United States Patent Application Publication US 2009/0305900 A1 - sequence listing, part 3

SEQ ID NO: 4043 - DNA, 2065 bp, Homosapiens
gctaaagagcgcgggtcctcggccgtggagggtcaagtggcttcttctgagcgctgagggaggggagcgtgcgtaggggatggtgccagcgctgcgttatttggttggtgcctgcggacgggcccgcgggcttttcgccggtggctcccctggggcgtgcgggttcgcgtctgggaggccaagaccgctgtgtggaggtagccgcagcgccagcaccagctcatttgatatagtcatcgttggtggcggaattgtggggcttgcctctgccagagcactcatcctgcgacatccatcactttctattggtgttctggaaaaggagaaagatttagctgttcaccagactggacataacagtggtgtcatacatagtggaatttattataaacctgagtctctgaaagccaaattatgtgtacaaggtgcagccctcctctatgagtactgtcagcaaaagggaatttcctacaagcagtgtggcaagcttatagtagctgttgaacaagaagaaattcccagacttcaggccctatatgagaaaggcctccagaatggtgtcccgggcctgaggctgatccagcaggaggatataaaaaagaaggagccatattgtaggggtctaatggctattgattgtccacatactggcattgtggactatcggcaggtggctttgtcatttgcccaggatttccaagaagcaggtggctctgtcttgaccaattttgaagtaaaaggtattgaaatggctaaagaaagtccttcaagaagtatagatggaatgcaatatccaattgttataaagaatacaaagggagaggaaattcgatgtcagtatgttgtgacatgtgcaggactttactcagaccgtatttcagagttgagtggctgcactcctgatcctcgaattgtaccattccggggagattacctgcttttgaagccagaaaaatgttatcttgtaaaaggaaatatttatccggtcccagatagccggtttcctttcctaggagttcacttcacaccaaggatggatggcagtatttggctagggcctaatgcagttcttgcctttaaacgagagggttacagaccctttgacttcagtgccacagatgttatggatataattatcaatagtggcttgattaaactggcatcccagaatttttcctatggagttactgaaatgtataaagcatgttttcttggtgcaacagtgaagtatcttcaaaaattcatccctgaaattactatcagtgatatacttaggggcccagctggagtaagagcccaggccctggatagagatggaaatctggtagaagattttgtatttgatgcaggagttggggatattggaaatcgcattcttcatgtgagaaatgcaccttctcctgctgctacttcttccattgcaatttctggaatgattgcagatgaagtacaacaaagatttgaattataaataatgaaaggagctaggtatgcactgtaatcttcatgtcagcaacaagaatgtactaattgcattctttaatttaaaaaatggtttttaaactttagtttttaggtcaaagataaccactgcattgttaaaatgatgtaacatagaaataataattttctacaaaaattagccaggcatggtggcgcatgcctgtaatctcagctactcaggaggctgaggcaggagaatcaattgaaccgagcagacggaggtgagctgagagctgagattgcaccactgcactccagcctgggtgacagagcaagaaaataataataataataattttcaaaatgttaggctgggggccgtggccagcactttgggaagccaaggcaggtagattgtagcccaggagtttgagaacagcctgggcaacatggcaaaaccctgtttctacacaaagttagctgggtctggtgcctctgtagttccagctcctcagtaggctgaggtgagaggatcacttgagcccaggaggtctaggctgcagtgagcttatgttcatgacactgcattccaggctggatgatagagcaagatcttgtctca

SEQ ID NO: 4044 - protein, 463 aa, Homosapiens; identical to SEQ ID NO: 562

SEQ ID NO: 4045 - DNA, 744 bp, Homosapiens
gggaggggagcgtgcgtaggggatggtgccagcgctgcgttatttggttggtgcctgcggacgggcccgcgggcttttcgccggtggctcccctggggcgtgcgggttcgcgtctgggaggccaagaccgctgtgtggaggtagccgcagcgccagcaccagctcatttgatatagtcatcgttggtggcggaattgtggggcttgcctctgccagagcactcatcctgcgacatccatcactttctattggtgttctggaaaaggagaaagatttagctgttcaccagactggacataacagtggtgtcatacatagtggaatttattataaacctgagtctctgaaagccaaattatgtgtacaaggtgcagccctcctctatgagtactgtcagcaaaagggaatttcctacaagcagtgtggcaagcttatagtagctgttgaacaagaagaaattcccagacttcaggccctatatgagaaaggcctccagaatggtgtcccgggcctgaggctgatccagcaggaggatataaaaaagaaggagccatattgtaggatatccagttgtgtcagcatcacttatcaaaaaaccattattttcccactgtgctgcagtattgcctttatgatatcagggtctaatggctattgattgtccacatactggcattgtggactatcggcaggtggctttgtcatttgcccaggatttccaagaagcaggtggctctgtcttga

SEQ ID NO: 4046 - protein, 211 aa, Homosapiens
MVPALRYLVGACGRARGLFAGGSPGACGFASGRPRPLCGGSRSASTSSFDIVIVGGGIVGLASARALILRHPSLSIGVLEKEKDLAVHQTGHNSGVIHSGIYYKPESLKAKLCVQGAALLYEYCQQKGISYKQCGKLIVAVEQEEIPRLQALYEKGLQNGVPGLRLIQQEDIKKKEPYCRISSCVSITYQKTIIFPLCCSIAFMISGSNGY

SEQ ID NO: 4047 - DNA, 972 bp, Homosapiens
tttttttatcctcttaacagagtctttttgcagagcaaaagttttatgttttgatgaagtccattttatcagttttttttcttttatggatcatgtttttgatgtcaactctaagtcccaagattttgtcctattttttcctaaaagttttaaagtgaatattaggtgatgtaaaaaattttgtgttagtttttttaactataatggtagtgtgtgtttttagagatgccttttagaaataacattgaaatatttacagatgaaataatgtggtgtttaagatttgcatcaaaataatataatacaggaggggatgaaatagagtatagaagaagcaagatttgctgtgagttgataattagtgaagctgggtgatgtatatgtggggcttcattgaactattttgtctaactttgtgtaggtatgaacttttccataaaaagcttaagaaaattatctgttaaaccattcattggtgttaacttgagattaagtgagttgtagagaaagatgtctctttcagcctccgtggttagcttggcctgcaactgtcctccagcattcatctatgactattgttctgttcacctgtctccatagtggatgcttggagatttgtgcttttgtttgtgaaacatatttcaatgattttgtgtcactggataaaacagtgattcttcagatttgagaagagggagtgaagggtggcacatgtagttggaaaaagcatattcagtatgatagttttatgtttgaaaataagaagggtttattgatagttgtagtataatctgcaaagacaatatcttggctgggaatctgtaccaaggtaataattctaagtggaaggtctacctccccaaaagcttttgtgttataattatcaaaaggcagcaaggggccaggcgcagtggctcacgcctgtattcccagcattttgggaggccgaggcgggtggatcactgaggcagg

SEQ ID NO: 4048 - protein, 39 aa, Homosapiens
MTIVLFTCLHSGCLEICAFVCETYFNDFVSLDKTVILQI

SEQ ID NO: 4049 - DNA, 719 bp, Homosapiens
gggccggccagggtgccgcagacgcggggacgctggctcgctccctccctccctccctccgacgctatcaaatgatgccgtttggaaaaatttcccagcagttgtgtggcgtaaagaaactcccatggtcatgtgactccagatacttctggggctggttgaatgcagtgtttaataaggtggattatgatcgcatcagggatgttggccctgacagggcggcatccgagtggttgctgcgctgtggggccatggtgcgctaccatggccaggagaggtggcagaaggactacaaccaccttccaacaggccctctggacaaatacaagattcaggcgatcgacgccaccgactcttgtatcatgagcattggatttgatcacatggagggcctagagcatgttgaaaaaataaggctgtgcaagtgtcattatatcgaggatgactgtttgctgagacttagtcaacttgaaaatttacaaaaaaccatattggaaatggaaataatatcctgtgggaatatcacagacaaaggcatcattgctttgcgtcatttaagagcctagaacactgcctgacactgtaataatcatcaaaagcatgcatccactggttaggaaagctgttctacatcctcttgtgccaccaaccagacccacgccatggcctggagcaagtcacctaatcccaaatgcaaaaacagataatactagcaagga

SEQ ID NO: 4050 - protein, 164 aa, Homosapiens
MMPFGKISQQLCGVKKLPWSCDSRYFWGWLNAVFNKVDYDRIRDVGPDRAASEWLLRCGAMVRYHGQERWQKDYNHLPTGPLDKYKIQAIDATDSCIMSIGFDHMEGLEHVEKIRLCKCHYIEDDCLLRLSQLENLQKTILEMEIISCGNITDKGIIALRHLRA

SEQ ID NO: 4051 - DNA, 1229 bp, Homosapiens
cggccagggtgccgcagacgcggggacgctggctcgctccctccctccctccctccgacgctgtgagtagagaagctaggccccgagccgggcgggactagggtggtggttgtgttctgccctcgcccgtcgccaacgctgggctgactgaaaacctggccctttgggtcgcgcgtcttcgaccttcaccgccatgcggacatggggccgtgggagaaactctgggcgggattacggtgaaaattcttgtttgggcgggccctgcggcttctttcttccggctcgccctcggccccgcccccgccccgcccccgctccagctccagccgggtcctcgctcggccccgcacgcggcccgcggtagacggagggcctgggcacccaccgtctccatcccggccccagcccagtcgagcgtccactagaagggcgctccctgtccggccctaatcctcgctcctcacggaggctctttgtcacagcgaagactgacagcccgcagtcttctggacttcttttatggggctcctggcggtgctattcattcagtcattgattcgtcttgtaaatatggagcgcctgctctgtactcgacccggcactgggtaccggaagaaccagacagctcggtttttgccaccatttataagtctgtgtccttttcttgagtactgaaccgagatacagttttaaatgtgctgtgcggtctctgagcagcgactcacctgtgcagatcaaatgatgccgtttggaaaaatttcccagcagttgtgtggcgtaaagaaactcccatggtcatgtgactccagatacttctggggctggttgaatgcagtgtttaataaggtggattatgatcgcatcagggatgttggccctgacagggcggcatccgagtggttgctgcgctgtggggccatggtgcgctaccatggccaggagaggtggcagaaggactacaaccaccttccaacaggccctctggacaaatacaagattcaggcgatcgacgccaccgactcttgtatcatgagcattggatttgatcacatgggtaactaccctatcgttttgctaatagaaaatgcagatgatttgcagtgaccattttgttgcagttgactcacgattatagtcataggtatgtcctttttgcccatttcattatagtcaagtttgtttcttcctgtgtttgatatttattttcaaattaaattgaggttacagac

SEQ ID NO: 4052 - protein, 136 aa, Homosapiens; identical to SEQ ID NO: 568

SEQ ID NO: 4053 - DNA, 1342 bp, Homosapiens
cggccagggtgccgcagacgcggggacgctggctcgctccctccctccctccctccgacgctgtgagtagagaagctaggccccgagccgggcgggactagggtggtggttgtgttctgccctcgcccgtcgccaacgctgggctgactgaaaacctggccctttgggtcgcgcgtcttcgaccttcaccgccatgcggacatggggccgtgggagaaactctgggcgggattacggtgaaaattcttgtttgggcgggccctgcggcttctttcttccggctcgccctcggccccgcccccgccccgcccccgctccagctccagccgggtcctcgctcggccccgcacgcggcccgcggtagacggagggcctgggcacccaccgtctccatcccggccccagcccagtcgagcgtccactagaagggcgctccctgtccggccctaatcctcgctcctcacggaggctctttgtcacagcgaagactgacagcccgcagtcttctggacttcttttatggggctcctggcggtgctattcattcagtcattgattcgtcttgtaaatatggagcgcctgctctgtactcgacccggcactgggtaccggaagaaccagacagctcggtttttgccaccatttataagtctgtgtccttttcttgagtactgaaccgagatacagttttaaatgtgctgtgcggtctctgagcagcgactcacctgtgcagatcaaatgatgccgtttggaaaaatttcccagcagttgtgtggcgtaaagaaactcccatggtcatgtgactccagatacttctggggctggttgaatgcagtgtttaataaggtggattatgatcgcatcagggatgttggccctgacagggcggcatccgagtggttgctgcgctgtggggccatggtgcgctaccatggccaggagaggtggcagaaggactacaaccaccttccaacaggccctctggacaaatacaagattcaggcgatcgacgccaccgactcttgtatcatgagcattggatttgatcacatggagggcctagagcatgttgaaaaaataaggctgtgcaagtgtcattatatcgaggatgactgtttgctgagacttagtcaacttgaaaatttacaaaaaaccatattggaaatggaaataatatcctgtgggaatatcacagacaaaggcatcattgctttgcgtcatttaagaaacctcaaatatttgttgttaagtgatcttcctggagtaagagaaaaagaaaatcttgtccaagcctttaagacagcactgccttctctggaactaaaattacaattgaagtaaa

SEQ ID NO: 4054 - protein, 215 aa, Homosapiens; identical to SEQ ID NO: 564

SEQ ID NO: 4055 - DNA, 1390 bp, Homosapiens
cggccagggtgccgcagacgcggggacgctggctcgctccctccctccctccctccgacgctgtgagtagagaagctaggccccgagccgggcgggactagggtggtggttgtgttctgccctcgcccgtcgccaacgctgggctgactgaaaacctggccctttgggtcgcgcgtcttcgaccttcaccgccatgcggacatggggccgtgggagaaactctgggcgggattacggtgaaaattcttgtttgggcgggccctgcggcttctttcttccggctcgccctcggccccgcccccgccccgcccccgctccagctccagccgggtcctcgctcggccccgcacgcggcccgcggtagacggagggcctgggcacccaccgtctccatcccggccccagcccagtcgagcgtccactagaagggcgctccctgtccggccctaatcctcgctcctcacggaggctctttgtcacagcgaagactgacagcccgcagtcttctggacttcttttatggggctcctggcggtgctattcattcagtcattgattcgtcttgtaaatatggagcgcctgctctgtactcgacccggcactgggtaccggaagaaccagacagctcggtttttgccaccatttataagtctgtgtccttttcttgagtactgaaccgagatacagttttaaatgtgctgtgcggtctctgagcagcgactcacctgtgcaggataagtgcccaagagtacaattgctgggtcatatgatcaaatgatgccgtttggaaaaatttcccagcagttgtgtggcgtaaagaaactcccatggtcatgtgactccagatacttctggggctggttgaatgcagtgtttaataaggtggattatgatcgcatcagggatgttggccctgacagggcggcatccgagtggttgctgcgctgtggggccatggtgcgctaccatggccaggagaggtggcagaaggactacaaccaccttccaacaggccctctggacaaatacaagattcaggcgatcgacgccaccgactcttgtatcatgagcattggatttgatcacatggagggcctagagcatgttgaaaaaataaggctgtgcaagtgtcattatatcgaggatgactgtttgctgagacttagtcaacttgaaaatttacaaaaaaccatattggaaatggaaataatatcctgtgggaatatcacagacaaaggcatcattgctttgcgtcatttaagaaacctcaaatatttgttgttaagtgatcttcctggagtaagagaaaaagaaaatcttgtccaagcctttaagacagcactgccttctctggaactaaaattacaattgaagtaaaataatgtgtctt

SEQ ID NO: 4056 - protein, 200 aa, Homosapiens
MMPFGKISQQLCGVKKLPWSCDSRYFWGWLNAVFNKVDYDRIRDVGPDRAASEWLLRCGAMVRYHGQERWQKDYNHLPTGPLDKYKIQAIDATDSCIMSIGFDHMEGLEHVEKIRLCKCHYIEDDCLLRLSQLENLQKTILEMEIISCGNITDKGIIALRHLRNLKYLLLSDLPGVREKENLVQAFKTALPSLELKLQLK

SEQ ID NO: 4057 - DNA, 2868 bp, Homosapiens
cggccagggtgccgcagacgcggggacgctggctcgctccctccctccctccctccgacgctgtgagtagagaagctaggccccgagccgggcgggactagggtggtggttgtgttctgccctcgcccgtcgccaacgctgggctgactgaaaacctggccctttgggtcgcgcgtcttcgaccttcaccgccatgcggacatggggccgtgggagaaactctgggcgggattacggtgaaaattcttgtttgggcgggccctgcggcttctttcttccggctcgccctcggccccgcccccgccccgcccccgctccagctccagccgggtcctcgctcggccccgcacgcggcccgcggtagacggagggcctgggcacccaccgtctccatcccggccccagcccagtcgagcgtccactagaagggcgctccctgtccggccctaatcctcgctcctcacggaggctctttgtcacagcgaagactgacagcccgcagtcttctggacttcttttatggggctcctggcggtgctattcattcagtcattgattcgtcttgtaaatatggagcgcctgctctgtactcgacccggcactgggtaccggaagaaccagacagctcggtttttgccaccatttataagtctgtgtccttttcttgagtactgaaccgagatacagttttaaatgtgctgtgcggtctctgagcagcgactcacctgtgcagatcaaatgatgccgtttggaaaaatttcccagcagttgtgtggcgtaaagaaactcccatggtcatgtgactccagatacttctggggctggttgaatgcagtgtttaataaggtggattatgatcgcatcagggatgttggccctgacagggcggcatccgagtggttgctgcgctgtggggccatggtgcgctaccatggccaggagaggtggcagaaggactacaaccaccttccaacaggccctctggacaaatacaagattcaggcgatcgacgccaccgactcttgtatcatgagcattggatttgatcacatggagggcctagagcatgttgaaaaaataaggctgtgcaagtgtcattatatcgaggatgactgtttgctgagacttagtcaacttgaaaatttacaaaaaaccatattggaaatggaaataatatcctgtgggaatatcacagacaaaggcatcattgctttgcgtcatttaagaaacctcaaatatttgttgttaagtgatcttcctggagtaagagaaaaagaaaatcttgtccaagcctttaagacagcactgccttctctggaactaaaattacaattgaagtaaaataatgtgtcttatttcagtataaaggatcatttgaaactgttgattccaaacatcaactaatattatatagtcatcagtagaattataaggatgccatatcatgacattttagaagtggagagtgcatcatatgtagaaaataaatattcagacgtggctcattaatgttactaagttggaagtgagaatttatgaacattaattcattttaagaaaagtgcagccaggcgcagtggctcatgcctgtaatcctagcactttgggaggccaaagcgggcagatcacctgaggtcaggagttcaagaccaaccatggccaacatggtgaaaccccatctctactaaaaaaacaaaattagctgaatgtggtggtgcacgcctttaatcccagctactctggaggctgaggcaggagaatcacttgacttgggaggtggaggttgcagggacccgagattgtgccactgcactccagcctgggtgacagagcgagactgtctcaaaaaaaaaaaaaaaagaaaaatgtaaactaggtaacattttaattctaatatattcatttaatatgtaaatctatagatatctcttgatgtagatatttagaatcctttaaagttatttgtacaacagatgtttttattataacagtaatttacatttaactttaaagttagtgaagcatactaccataaatgcacaattatgaaaaattagaagctaaattacagattcattgatggagtcaattatgcaaagtggtcagtggttgttgaagcatgcattgcttcaacaggatttgcgtgcatttcccatgatcctgcattcttgtgttcttgatagcatacagacttactcagaatcaacagttgctgcttaatttgtctattttgtaagcttaggctactattttattaaaactggacatagatacttggctgaatacaaatagttttgcagattgcaatataataaaggaaacagtaaaaactagtgggctatgcttaggtttttcttgaaacctaacattgctttaggctgggtgccgtggctcgtgcctgtaatcccagtgctttgggaggctgaggtgggaggatcacttgagaccaggagtttgagaccaatttgggcaacacagtgagaccccatctctaaaaaaattttaaaaattaggcaggcatggtggtgcatacctgtaatctcagatacttgggaggttgaggtggtaggattgcttgagctcaggagtttgaggctgcagtaagctatgatcacggccactgcacaccagcctggtagcctgggtgaaagggggagaccctgtctcttaaaaaaaagggctggcctgtaatcccagcacttttgaaggccaaggcaggcagatcatttgagcccaggagttcaggacgagcctgggcaacatggcaaaaccctgtctctaccaaaaaattaaaaaataaaaaatagctgggtgtagtggcacatgcctgtagtcccaactactcaggagtctgaggtaggaggatca

SEQ ID NO: 4058 - protein, 215 aa, Homosapiens; identical to SEQ ID NO: 564

SEQ ID NO: 4059 - DNA, 2696 bp, Homosapiens
cggccagggtgccgcagacgcggggacgctggctcgctccctccctccctccctccgacgctgtgagtagagaagctaggccccgagccgggcgggactagggtggtggttgtgttctgccctcgcccgtcgccaacgctgggctgactgaaaacctggccctttgggtcgcgcgtcttcgaccttcaccgccatgcggacatggggccgtgggagaaactctgggcgggattacggtgaaaattcttgtttgggcgggccctgcggcttctttcttccggctcgccctcggccccgcccccgccccgcccccgctccagctccagccgggtcctcgctcggccccgcacgcggcccgcggtagacggagggcctgggcacccaccgtctccatcccggccccagcccagtcgagcgtccactagaagggcgctccctgtccggccctaatcctcgctcctcacggaggctctttgtcacagcgaagactgacagcccgcagtcttctggacttcttttatggggctcctggcggtgctattcattcagtcattgattcgtcttgtaaatatggagcgcctgctctgtactcgacccggcactgggtaccggaagaaccagacagctcggtttttgccaccatttataagtctgtgtccttttcttgagtactgaaccgagatacagttttaaatgtgctgtgcggtctctgagcagcgactcacctgtgcagatcaaatgatgccgtttggaaaaatttcccagcagttgtgtggcgtaaagaaactcccatggtcatgtgactccagatacttctggggctggttgaatgcagtgtttaataaggtggattatgatcgcatcagggatgttggccctgacagggcggcatccgagtggttgctgcgctgtggggccatggtgcgctaccatggccaggagaggtggcagaaggactacaaccaccttccaacaggccctctggacaaatacaagattcaggcgatcgacgccaccgactcttgtatcatgagcattggatttgatcacatggaaacctcaaatatttgttgttaagtgatcttcctggagtaagagaaaaagaaaatcttgtccaagcctttaagacagcactgccttctctggaactaaaattacaattgaagtaaaataatgtgtcttatttcagtataaaggatcatttgaaactgttgattccaaacatcaactaatattatatagtcatcagtagaattataaggatgccatatcatgacattttagaagtggagagtgcatcatatgtagaaaataaatattcagacgtggctcattaatgttactaagttggaagtgagaatttatgaacattaattcattttaagaaaagtgcagccaggcgcagtggctcatgcctgtaatcctagcactttgggaggccaaagcgggcagatcacctgaggtcaggagttcaagaccaaccatggccaacatggtgaaaccccatctctactaaaaaaacaaaattagctgaatgtggtggtgcacgcctttaatcccagctactctggaggctgaggcaggagaatcacttgacttgggaggtggaggttgcagggacccgagattgtgccactgcactccagcctgggtgacagagcgagactgtctcaaaaaaaaaaaaaaaagaaaaatgtaaactaggtaacattttaattctaatatattcatttaatatgtaaatctatagatatctcttgatgtagatatttagaatcctttaaagttatttgtacaacagatgtttttattataacagtaatttacatttaactttaaagttagtgaagcatactaccataaatgcacaattatgaaaaattagaagctaaattacagattcattgatggagtcaattatgcaaagtggtcagtggttgttgaagcatgcattgcttcaacaggatttgcgtgcatttcccatgatcctgcattcttgtgttcttgatagcatacagacttactcagaatcaacagttgctgcttaatttgtctattttgtaagcttaggctactattttattaaaactggacatagatacttggctgaatacaaatagttttgcagattgcaatataataaaggaaacagtaaaaactagtgggctatgcttaggtttttcttgaaacctaacattgctttaggctgggtgccgtggctcgtgcctgtaatcccagtgctttgggaggctgaggtgggaggatcacttgagaccaggagtttgagaccaatttgggcaacacagtgagaccccatctctaaaaaaattttaaaaattaggcaggcatggtggtgcatacctgtaatctcagatacttgggaggttgaggtggtaggattgcttgagctcaggagtttgaggctgcagtaagctatgatcacggccactgcacaccagcctggtagcctgggtgaaagggggagaccctgtctcttaaaaaaaagggctggcctgtaatcccagcacttttgaaggccaaggcaggcagatcatttgagcccaggagttcaggacgagcctgggcaacatggcaaaaccctgtctctaccaaaaaattaaaaaataaaaaatagctgggtgtagtggcacatgcctgtagtcccaactactcaggagtctgaggtaggaggatca

SEQ ID NO: 4060 - protein, 127 aa, Homosapiens; identical to SEQ ID NO: 566

SEQ ID NO: 4061 - DNA, 2232 bp, Homosapiens
ggccagggtgccgcagacgcggggacgctggctcgctccctccctccctccctccgacgctgataagtgcccaagagtacaattgctgggtcatatgatcaaatgatgccgtttggaaaaatttcccagcagttgtgtggcgtaaagaaactcccatggtcatgtgactccagatacttctggggctggttgaatgcagtgtttaataaggtggattatgatcgcatcagggatgttggccctgacagggcggcatccgagtggttgctgcgctgtggggccatggtgcgctaccatggccaggagaggtggcagaaggactacaaccaccttccaacaggccctctggacaaatacaagattcaggcgatcgacgccaccgactcttgtatcatgagcattggatttgatcacatggagggcctagagcatgttgaaaaaataaggctgtgcaagtgtcattatatcgaggatgactgtttgctgagacttagtcaacttgaaaatttacaaaaaaccatattggaaatggaaataatatcctgtgggaatatcacagacaaaggcatcattgctttgcgtcatttaagaaacctcaaatatttgttgttaagtgatcttcctggagtaagagaaaaagaaaatcttgtccaagcctttaagacagcactgccttctctggaactaaaattacaattgaagtaaaataatgtgtcttatttcagtataaaggatcatttgaaactgttgattccaaacatcaactaatattatatagtcatcagtagaattataaggatgccatatcatgacattttagaagtggagagtgcatcatatgtagaaaataaatattcagacgtggctcattaatgttactaagttggaagtgagaatttatgaacattaattcattttaagaaaagtgcagccaggcgcagtggctcatgcctgtaatcctagcactttgggaggccaaagcgggcagatcacctgaggtcaggagttcaagaccaaccatggccaacatggtgaaaccccatctctactaaaaaaacaaaattagctgaatgtggtggtgcacgcctttaatcccagctactctggaggctgaggcaggagaatcacttgacttgggaggtggaggttgcagggacccgagattgtgccactgcactccagcctgggtgacagagcgagactgtctcaaaaaaaaaaaaaaaagaaaaatgtaaactaggtaacattttaattctaatatattcatttaatatgtaaatctatagatatctcttgatgtagatatttagaatcctttaaagttatttgtacaacagatgtttttattataacagtaatttacatttaactttaaagttagtgaagcatactaccataaatgcacaattatgaaaaattagaagctaaattacagattcattgatggagtcaattatgcaaagtggtcagtggttgttgaagcatgcattgcttcaacaggatttgcgtgcatttcccatgatcctgcattcttgtgttcttgatagcatacagacttactcagaatcaacagttgctgcttaatttgtctattttgtaagcttaggctactattttattaaaactggacatagatacttggctgaatacaaatagttttgcagattgcaatataataaaggaaacagtaaaaactagtgggctatgcttaggtttttcttgaaacctaacattgctttaggctgggtgccgtggctcgtgcctgtaatcccagtgctttgggaggctgaggtgggaggatcacttgagaccaggagtttgagaccaatttgggcaacacagtgagaccccatctctaaaaaaattttaaaaattaggcaggcatggtggtgcatacctgtaatctcagatacttgggaggttgaggtggtaggattgcttgagctcaggagtttgaggctgcagtaagctatgatcacggccactgcacaccagcctggtagcctgggtgaaagggggagaccctgtctcttaaaaaaaagggctggcctgtaatcccagcacttttgaaggccaaggcaggcagatcatttgagcccaggagttcaggacgagcctgggcaacatggcaaaaccctgtctctaccaaaaaattaaaaaataaaaaatagctgggtgtagtggcacatgcctgtagtcccaactactcaggagtctgaggtaggaggatca

SEQ ID NO: 4062 - protein, 200 aa, Homosapiens; identical to SEQ ID NO: 4056

SEQ ID NO: 4063 - DNA, 656 bp, Homosapiens
agacgcggggacgctggctcgctccctccctccctccctccgacgctatcaaatgatgccgtttggaaaaatttcccagcagttgtgtggcgtaaagaaactcccatggtcatgtgactccagatacttctggggctggttgaatgcagtgtttaataaggtggattatgatcgcatcagggatgttggccctgacagggcggcatccgagtggttgctgcgctgtggggccatggtgcgctaccatggccaggagaggtggcagaaggactacaaccaccttccaacaggccctctggacaaatacaagattcaggcgatcgacgccaccgactcttgtatcatgagcattggatttgatcacatggagggcctagagcatgttgaaaaaataaggctgtgcaagtgtcattatatcgaggatgactgtttgctgagacttagtcaacttgaaaatttacaaaaaaccatattggaaatggaaataatatcctgtgggaatatcacagacaaaggcatcattgctttgcgtcatttaagaaacctcaaatatttgttgttaagtgatcttcctggagtaagagaaaaagaaaatcttgtccaagcctttaagacagcactgccttctctggaactaaaattacaattgaagtaaa

SEQ ID NO: 4064 - protein, 200 aa, Homosapiens; identical to SEQ ID NO: 4056

SEQ ID NO: 4065 - DNA, 2182 bp, Homosapiens
agacgcggggacgctggctcgctccctccctccctccctccgacgctatcaaatgatgccgtttggaaaaatttcccagcagttgtgtggcgtaaagaaactcccatggtcatgtgactccagatacttctggggctggttgaatgcagtgtttaataaggtggattatgatcgcatcagggatgttggccctgacagggcggcatccgagtggttgctgcgctgtggggccatggtgcgctaccatggccaggagaggtggcagaaggactacaaccaccttccaacaggccctctggacaaatacaagattcaggcgatcgacgccaccgactcttgtatcatgagcattggatttgatcacatggagggcctagagcatgttgaaaaaataaggctgtgcaagtgtcattatatcgaggatgactgtttgctgagacttagtcaacttgaaaatttacaaaaaaccatattggaaatggaaataatatcctgtgggaatatcacagacaaaggcatcattgctttgcgtcatttaagaaacctcaaatatttgttgttaagtgatcttcctggagtaagagaaaaagaaaatcttgtccaagcctttaagacagcactgccttctctggaactaaaattacaattgaagtaaaataatgtgtcttatttcagtataaaggatcatttgaaactgttgattccaaacatcaactaatattatatagtcatcagtagaattataaggatgccatatcatgacattttagaagtggagagtgcatcatatgtagaaaataaatattcagacgtggctcattaatgttactaagttggaagtgagaatttatgaacattaattcattttaagaaaagtgcagccaggcgcagtggctcatgcctgtaatcctagcactttgggaggccaaagcgggcagatcacctgaggtcaggagttcaagaccaaccatggccaacatggtgaaaccccatctctactaaaaaaacaaaattagctgaatgtggtggtgcacgcctttaatcccagctactctggaggctgaggcaggagaatcacttgacttgggaggtggaggttgcagggacccgagattgtgccactgcactccagcctgggtgacagagcgagactgtctcaaaaaaaaaaaaaaaagaaaaatgtaaactaggtaacattttaattctaatatattcatttaatatgtaaatctatagatatctcttgatgtagatatttagaatcctttaaagttatttgtacaacagatgtttttattataacagtaatttacatttaactttaaagttagtgaagcatactaccataaatgcacaattatgaaaaattagaagctaaattacagattcattgatggagtcaattatgcaaagtggtcagtggttgttgaagcatgcattgcttcaacaggatttgcgtgcatttcccatgatcctgcattcttgtgttcttgatagcatacagacttactcagaatcaacagttgctgcttaatttgtctattttgtaagcttaggctactattttattaaaactggacatagatacttggctgaatacaaatagttttgcagattgcaatataataaaggaaacagtaaaaactagtgggctatgcttaggtttttcttgaaacctaacattgctttaggctgggtgccgtggctcgtgcctgtaatcccagtgctttgggaggctgaggtgggaggatcacttgagaccaggagtttgagaccaatttgggcaacacagtgagaccccatctctaaaaaaattttaaaaattaggcaggcatggtggtgcatacctgtaatctcagatacttgggaggttgaggtggtaggattgcttgagctcaggagtttgaggctgcagtaagctatgatcacggccactgcacaccagcctggtagcctgggtgaaagggggagaccctgtctcttaaaaaaaagggctggcctgtaatcccagcacttttgaaggccaaggcaggcagatcatttgagcccaggagttcaggacgagcctgggcaacatggcaaaaccctgtctctaccaaaaaattaaaaaataaaaaatagctgggtgtagtggcacatgcctgtagtcccaactactcaggagtctgaggtaggaggatca

SEQ ID NO: 4066 - protein, 200 aa, Homosapiens; identical to SEQ ID NO: 4056

SEQ ID NO: 4067 - DNA, 801 bp, Homosapiens
atgataagaggtagtggagcagaggcttgcagtaatgaagacggctgtagtgaaaaagggatgaaaggggtggattatgatcgcatcagggatgttggccctgacagggcggcatccgagtggttgctgcgctgtggggccatggtgcgctaccatggccaggagaggtggcagaaggactacaaccaccttccaacaggccctctggacaaatacaagattcaggcgatcgacgccaccgactcttgtatcatgagcattggatttgatcacatggagggcctagagcatgttgaaaaaataaggctgtgcaagtgtcattatatcgaggatgactgtttgctgagacttagtcaacttgaaaatttacaaaaaaccatattggaaatggaaataatatcctgtgggaatatcacagacaaaggcatcattgctttgcgtcatttaagaaacctcaaatatttgttgttaagtgatcttcctggagctggaaaccctggcccctgtgtggcatcaggaagcagcaggacaagggcacctttaggattcagggagagggggcttcaggagacagatgtccctggggccctggttgatagatcctatgacctgtctcctagtgctggaatgaggatgctggagctgaaagccacaactgccatcctcaagtctagattccaactctctgtaccaggtggcagcctgctgtttaaacagtctcctgtggggcattcgtcaatctccttttggccgtataaggcgattttgcgccagtcacgtgctggagacaatcaggaataa

SEQ ID NO: 4068 - protein, 266 aa, Homosapiens
MIRGSGAEACSNEDGCSEKGMKGVDYDRIRDVGPDRAASEWLLRCGAMVRYHGQERWQKDYNHLPTGPLDKYKIQAIDATDSCIMSIGFDHMEGLEHVEKIRLCKCHYIEDDCLLRLSQLENLQKTILEMEIISCGNITDKGIIALRHLRNLKYLLLSDLPGAGNPGPCVASGSSRTRAPLGFRERGLQETDVPGALVDRSYDLSPSAGMRMLELKATTAILKSRFQLSVPGGSLLFKQSPVGHSSISFWPYKAILRQSRAGDNQE

SEQ ID NO: 4069 - DNA, 667 bp, Homosapiens
taaaaaaccccaagaacaagaaacaggagtgacttgctcagtaattgttgagtggcaaatcaaatgatgccgtttggaaaaatttcccagcagttgtgtggcgtaaagaaactcccatggtcatgtgactccagatacttctggggctggttgaatgcagtgtttaataaggtggattatgatcgcatcagggatgttggccctgacagggcggcatccgagtggttgctgcgctgtggggccatggtgcgctaccatggccaggagaggtggcagaaggactacaaccaccttccaacaggccctctggacaaatacaagattcaggcgatcgacgccaccgactcttgtatcatgagcattggatttgatcacatggagggcctagagcatgttgaaaaaataaggctgtgcaagtgtcattatatcgaggatgactgtttgctgagacttagtcaacttgaaaatttacaaaaaaccatattggaaatggaaataatatcctgtgggaatatcacagacaaaggcatcattgctttgcgtcatttaagaaacctcaaatatttgttgttaagtgatcttcctggagtaagagaaaaagaaaatcttgtccaagcctttaagacagcactgccttctctggaactaaaattacaattgaagtaaa

SEQ ID NO: 4070 - protein, 200 aa, Homosapiens; identical to SEQ ID NO: 4056

SEQ ID NO: 4071 - DNA, 2193 bp, Homosapiens
taaaaaaccccaagaacaagaaacaggagtgacttgctcagtaattgttgagtggcaaatcaaatgatgccgtttggaaaaatttcccagcagttgtgtggcgtaaagaaactcccatggtcatgtgactccagatacttctggggctggttgaatgcagtgtttaataaggtggattatgatcgcatcagggatgttggccctgacagggcggcatccgagtggttgctgcgctgtggggccatggtgcgctaccatggccaggagaggtggcagaaggactacaaccaccttccaacaggccctctggacaaatacaagattcaggcgatcgacgccaccgactcttgtatcatgagcattggatttgatcacatggagggcctagagcatgttgaaaaaataaggctgtgcaagtgtcattatatcgaggatgactgtttgctgagacttagtcaacttgaaaatttacaaaaaaccatattggaaatggaaataatatcctgtgggaatatcacagacaaaggcatcattgctttgcgtcatttaagaaacctcaaatatttgttgttaagtgatcttcctggagtaagagaaaaagaaaatcttgtccaagcctttaagacagcactgccttctctggaactaaaattacaattgaagtaaaataatgtgtcttatttcagtataaaggatcatttgaaactgttgattccaaacatcaactaatattatatagtcatcagtagaattataaggatgccatatcatgacattttagaagtggagagtgcatcatatgtagaaaataaatattcagacgtggctcattaatgttactaagttggaagtgagaatttatgaacattaattcattttaagaaaagtgcagccaggcgcagtggctcatgcctgtaatcctagcactttgggaggccaaagcgggcagatcacctgaggtcaggagttcaagaccaaccatggccaacatggtgaaaccccatctctactaaaaaaacaaaattagctgaatgtggtggtgcacgcctttaatcccagctactctggaggctgaggcaggagaatcacttgacttgggaggtggaggttgcagggacccgagattgtgccactgcactccagcctgggtgacagagcgagactgtctcaaaaaaaaaaaaaaaagaaaaatgtaaactaggtaacattttaattctaatatattcatttaatatgtaaatctatagatatctcttgatgtagatatttagaatcctttaaagttatttgtacaacagatgtttttattataacagtaatttacatttaactttaaagttagtgaagcatactaccataaatgcacaattatgaaaaattagaagctaaattacagattcattgatggagtcaattatgcaaagtggtcagtggttgttgaagcatgcattgcttcaacaggatttgcgtgcatttcccatgatcctgcattcttgtgttcttgatagcatacagacttactcagaatcaacagttgctgcttaatttgtctattttgtaagcttaggctactattttattaaaactggacatagatacttggctgaatacaaatagttttgcagattgcaatataataaaggaaacagtaaaaactagtgggctatgcttaggtttttcttgaaacctaacattgctttaggctgggtgccgtggctcgtgcctgtaatcccagtgctttgggaggctgaggtgggaggatcacttgagaccaggagtttgagaccaatttgggcaacacagtgagaccccatctctaaaaaaattttaaaaattaggcaggcatggtggtgcatacctgtaatctcagatacttgggaggttgaggtggtaggattgcttgagctcaggagtttgaggctgcagtaagctatgatcacggccactgcacaccagcctggtagcctgggtgaaagggggagaccctgtctcttaaaaaaaagggctggcctgtaatcccagcacttttgaaggccaaggcaggcagatcatttgagcccaggagttcaggacgagcctgggcaacatggcaaaaccctgtctctaccaaaaaattaaaaaataaaaaatagctgggtgtagtggcacatgcctgtagtcccaactactcaggagtctgaggtaggaggatca

SEQ ID NO: 4072 - protein, 200 aa, Homosapiens; identical to SEQ ID NO: 4056

SEQ ID NO: 4073 - DNA, 786 bp, Homosapiens
aaaaaaagaaaaatgtaaactaggtaacattttaattctaatatattcatttaatatgtaaatctatagatatctcttgatgtagatatttagaatcctttaaagttatttgtacaacagatgtttttattataacagtaatttacatttaactttaaagttagtgaagcatactaccataaatgcacaattatgaaaaattagaagctaaattacagattcattgatggagtcaattatgcaaagtggtcagtggttgttgaagcatgcattgcttcaacaggatttgcgtgcatttcccatgatcctgcattcttgtgttcttgatagcatacagacttactcagaatcaacagttgctgcttaatttgtctattttgtaagcttaggctactattttattaaaactggacatagatacttggctgaatacaaatagttttgcagattgcaatataataaaggaaacagtaaaaactagtgggctatgcttaggtttttcttgaaacctaacattgctttaggctgggtgccgtggctcgtgcctgtaatcccatgctgggagccaccgcgcccagcctggtttgaacattattaagctgttgaatataaacttgaaaataattttctatgatacagctttcaggtagaaaaatgaattttcgttgtgtttaacaatgttgtgtttaacagcttatacaaataacacagtataaatggtaattgccactgtcattttaaaaatcagaaaatagtaaataaaaggatgtggaagagtctcatgtg

SEQ ID NO: 4074 - protein, 36 aa, Homosapiens
MLRFFLKPNIALGWVPWLVPVIPCWEPPRPAWFEHY

SEQ ID NO: 4075 - DNA, 3718 bp, Homosapiens
aaaaaaagaaaaatgtaaactaggtaacattttaattctaatatattcatttaatatgtaaatctatagatatctcttgatgtagatatttagaatcctttaaagttatttgtacaacagatgtttttattataacagtaatttacatttaactttaaagttagtgaagcatactaccataaatgcacaattatgaaaaattagaagctaaattacagattcattgatggagtcaattatgcaaagtggtcagtggttgttgaagcatgcattgcttcaacaggatttgcgtgcatttcccatgatcctgcattcttgtgttcttgatagcatacagacttactcagaatcaacagttgctgcttaatttgtctattttgtaagcttaggctactattttattaaaactggacatagatacttggctgaatacaaatagttttgcagattgcaatataataaaggaaacagtaaaaactagtgggctatgcttaggtttttcttgaaacctaacattgctttaggctgggtgccgtggctcgtgcctgtaatcccatgctgggagccaccgcgcccagcctggtttgaacattattaagctgttgaatataaacttgaaaataattttctatgatacagctttcaggtagaaaaatgaattttcgttgtgtttaacaatgttgtgtttaacagcttatacaaataacacagtataaatggtaattgccactgtcattttaaaaatcagaaaatagtaaataaaaggatgtggaagagtctcatgtgatacagtggagatttcataccgaataaaagcattataaatatggttaaattgaacataagcataaatttaacggaactcattagaaaaaaataagccttttttctcaggtttgtttcattactgtatggtgagacaactgattcaccacgatttagtctagagctacttttctattctgaatagtttttggtaaaactattggctgaattattaggctgttatagtaatctgcctccgtcaagtgtattttcttgggttaaggaaaaaaaaatttttttttaactattcacggaagctggatgttcttccttgtcatttgaatcaaggccgtctaacaggaattgaataattcagggactagcatttaacccatatcaggtctaggcaagaaaagacatacattaggaagccttaggatatcattaaactgcctagggtagtcaaaattattgagtagacaccagacctcagtggattacttaagtaaatggggtcagatgtcatcatgaagaaaattaacaggaagaaaatgagagtacagaagaaatgttttgaaaatagagtgaaatacaactttgaagaccatggctgagaagtgctaggaatagtggcagcacatcaaccagaaatggtgttgagctgtaagaaacagacgtcaggcttcatattgcccttgtgtccaggggacaaggatgaaaaagctttttgattaagagcagtagaccaaatcaaagctaattatgtcattttggccaggcgcagtggctcatgcctgtaatgccagcactttggaaggccaaggcgctcagatcacgtgagcccaggagttcaagaccagcctggggaacatggcaaaaccctgcctctaccaaaaaatacaaaaaaattagccagtatagtggcacatgcctgcagtcccagctacttgggaggctgaggtggcaggttttatatatatatataaaaaacacatatatatatatgtgtgtgtgtgtcatcattttaagtctcactgtgcaaagctatgagtcctcaatactttggactacttagtgtaatatattagttgttagaatagcatatatatatatatatatatatatatacatacacatacatacacatacaaacatagtgcaaaaagatgtttcagggaaaacatcagtttacaacataatgtctttcatgactcaagtaaaagctcacaagtaatttcttctgaaacccagatcactgaattacaggtttgcctatagatgtaccaggtcaaaggctgtgccagagagaatgaaatactaattattttcaggctgataggttcagttcctgcaaagcctgtaggtcttgctctaccctttgactgccttaatcagctgccgagcttcatgccattgtttacaaggggaattgggtgaataaatgtagacagattacagtaaatccacgttgcctgcaaaagtgactaaggtgtatcctttactgataaagtaaggatgaaatgtggaaacatataattaaattataaattaccaagcttttgtgataattcatatgcttttaaatattttgaacctaagtgttaccctcaaaatgttttaaaatataaaaatcaagaaatagagcaagcaggaaatgggattttaaacattttgatttcaagaaatagaactatcttaaatatgatgctgaaacaatctgagaggcaggagataggactcaggcaacagagatccgaggaaatatatatgggcattttgtggttcatttttcttgtgtggcatgtggtacaactgaagcataaatctttttgatatcatctagttttgccagaggtatgggacagttcatattctgtccataagttcggctacttacataaactgaaatacaagtgcaactccaaacaggttttttcttttctggacaccatcatcaagcatggaagactggatctggaatttcccttcatatcttgccagttggcctcccagtttcttgcttatgttttctcctggtgtgttttcaacattgtaattgttttcaatcaactgtataagttttattttcttcaaagcatctattgattccttttttaaaatcatgtctcctagctcctttaaatgtttggaaaacggtagttaagtttcttggtatcacagtagtacttcttattatccaaagctggaaggatgctgctgccagttagctggggtaggtactgcaactaaaaatgcaaaacacagaattaggttcaaaactgtgccatgcatttttttcattatttagaatatatcacaaaagaggtaattaagctttttagtatagaagtactttttttgcacacaatccaggacttgagagaggattaaatgtttcaatttcgtcttggcttttccttttaaatgtttatattaaaaaggaaaaacattcacattaaagaagatttagagaatatgaaaaggggaaaatctacatgttaacattattgggaagaaaacatagatttacaggagttgagagcttgctgagatcttagggatcatttaagccaatgccttgtcttatagcggagaaaactgataaacagagcacctaggcaatttgcctactcactctcttcccttagttaaaaaggcaaatcaagcatggcacagtgtacacttgtagttccagctacaagggaggctgagtgggagcatcccttgagcccaggagagcagcctgggcaacatagcaagatccccatctctaaagaaaaaagacaaactgcttccttcaagcttcctgaaaatgtttgaatttattgtcaatgtcaaatgaaagaacacacctgtattttttgtattgcactatatgtccttcggtatccctaaaaagggaactgtttagtacttttactttctagaaaaaaatttttcagccattgtcctc

SEQ ID NO: 4076 - protein, 36 aa, Homosapiens; identical to SEQ ID NO: 4074

SEQ ID NO: 4077 - DNA, 4192 bp, Homosapiens
cagattcattgatggagtcaattatgcaaagtggtcagtggttgttgaagcatgcattgcttcaacaggatttgcgtgcatttcccatgatcctgcattcttgtgttcttgatagcatacagacttactcagaatcaacagttgctgcttaatttgtctattttgtaagcttaggctactattttattaaaactggacatagatacttggctgaatacaaatagttttgcagattgcaatataataaaggaaacagtaaaaactagtgggctatgcttaggtttttcttgaaacctaacattgctttaggctgggtgccgtggctcgtgcctgtaatcccagtgctttgggaggctgaggtgggaggatcacttgagaccaggagtttgagaccaatttgggcaacacagtgagaccccatctctaaaaaaattttaaaaattaggcaggcatggtggtgcatacctgtaatctcagatacttgggaggttgaggtggtaggattgcttgagctcaggagtttgaggctgcagtaagctatgatcacggccactgcacaccagcctggtagcctgggtgaaagggggagaccctgtctcttaaaaaaaagggctggcctgtaatcccagcacttttgaaggccaaggcaggcagatcatttgagcccaggagttcaggacgagcctgggcaacatggcaaaaccctgtctctaccaaaaaattaaaaaataaaaaatagctgggtgtagtggcacatgcctgtagtcccaactactcaggagtctgaggtaggaggatcagttgagcccgggaagtcgaggctgcatggtgtgatctcagttcactgcaacctctgcctcccgggttcaagcagttctctgtcgcagcgtcccaggtagctgggattacaggcgcccaccaccacgcccagctaatttttgtacttttagtagagacagggtttcaccatcttggccagactggtcttgaactcctaacctcaggatccacccgcctcggcctcccaaagtgctgggagccaccgcgcccagcctggtttgaacattattaagctgttgaatataaacttgaaaataattttctatgatacagctttcaggtagaaaaatgaattttcgttgtgtttaacaatgttgtgtttaacagcttatacaaataacacagtataaatggtaattgccactgtcattttaaaaatcagaaaatagtaaataaaaggatgtggaagagtctcatgtgatacagtggagatttcataccgaataaaagcattataaatatggttaaattgaacataagcataaatttaacggaactcattagaaaaaaataagccttttttctcaggtttgtttcattactgtatggtgagacaactgattcaccacgatttagtctagagctacttttctattctgaatagtttttggtaaaactattggctgaattattaggctgttatagtaatctgcctccgtcaagtgtattttcttgggttaaggaaaaaaaaatttttttttaactattcacggaagctggatgttcttccttgtcatttgaatcaaggccgtctaacaggaattgaataattcagggactagcatttaacccatatcaggtctaggcaagaaaagacatacattaggaagccttaggatatcattaaactgcctagggtagtcaaaattattgagtagacaccagacctcagtggattacttaagtaaatggggtcagatgtcatcatgaagaaaattaacaggaagaaaatgagagtacagaagaaatgttttgaaaatagagtgaaatacaactttgaagaccatggctgagaagtgctaggaatagtggcagcacatcaaccagaaatggtgttgagctgtaagaaacagacgtcaggcttcatattgcccttgtgtccaggggacaaggatgaaaaagctttttgattaagagcagtagaccaaatcaaagctaattatgtcattttggccaggcgcagtggctcatgcctgtaatgccagcactttggaaggccaaggcgctcagatcacgtgagcccaggagttcaagaccagcctggggaacatggcaaaaccctgcctctaccaaaaaatacaaaaaaattagccagtatagtggcacatgcctgcagtcccagctacttgggaggctgaggtggcaggttttatatatatatataaaaaacacatatatatatatgtgtgtgtgtgtcatcattttaagtctcactgtgcaaagctatgagtcctcaatactttggactacttagtgtaatatattagttgttagaatagcatatatatatatatatatatatatatacatacacatacatacacatacaaacatagtgcaaaaagatgtttcagggaaaacatcagtttacaacataatgtctttcatgactcaagtaaaagctcacaagtaatttcttctgaaacccagatcactgaattacaggtttgcctatagatgtaccaggtcaaaggctgtgccagagagaatgaaatactaattattttcaggctgataggttcagttcctgcaaagcctgtaggtcttgctctaccctttgactgccttaatcagctgccgagcttcatgccattgtttacaaggggaattgggtgaataaatgtagacagattacagtaaatccacgttgcctgcaaaagtgactaaggtgtatcctttactgataaagtaaggatgaaatgtggaaacatataattaaattataaattaccaagcttttgtgataattcatatgcttttaaatattttgaacctaagtgttaccctcaaaatgttttaaaatataaaaatcaagaaatagagcaagcaggaaatgggattttaaacattttgatttcaagaaatagaactatcttaaatatgatgctgaaacaatctgagaggcaggagataggactcaggcaacagagatccgaggaaatatatatgggcattttgtggttcatttttcttgtgtggcatgtggtacaactgaagcataaatctttttgatatcatctagttttgccagaggtatgggacagttcatattctgtccataagttcggctacttacataaactgaaatacaagtgcaactccaaacaggttttttcttttctggacaccatcatcaagcatggaagactggatctggaatttcccttcatatcttgccagttggcctcccagtttcttgcttatgttttctcctggtgtgttttcaacattgtaattgttttcaatcaactgtataagttttattttcttcaaagcatctattgattccttttttaaaatcatgtctcctagctcctttaaatgtttggaaaacggtagttaagtttcttggtatcacagtagtacttcttattatccaaagctggaaggatgctgctgccagttagctggggtaggtactgcaactaaaaatgcaaaacacagaattaggttcaaaactgtgccatgcatttttttcattatttagaatatatcacaaaagaggtaattaagctttttagtatagaagtactttttttgcacacaatccaggacttgagagaggattaaatgtttcaatttcgtcttggcttttccttttaaatgtttatattaaaaaggaaaaacattcacattaaagaagatttagagaatatgaaaaggggaaaatctacatgttaacattattgggaagaaaacatagatttacaggagttgagagcttgctgagatcttagggatcatttaagccaatgccttgtcttatagcggagaaaactgataaacagagcacctaggcaatttgcctactcactctcttcccttagttaaaaaggcaaatcaagcatggcacagtgtacacttgtagttccagctacaagggaggctgagtgggagcatcccttgagcccaggagagcagcctgggcaacatagcaagatccccatctctaaagaaaaaagacaaactgcttccttcaagcttcctgaaaatgtttgaatttattgtcaatgtcaaatgaaagaacacacctgtattttttgtattgcactatatgtccttcggtatccctaaaaagggaactgtttagtacttttactttctagaaaaaaatttttcagccattgtcctc

SEQ ID NO: 4078 - protein, 47 aa, Homosapiens
MPVVPTTQESEVGGSVEPGKSRLHGVISVHCNLCLPGSSSSLSQRPR

SEQ ID NO: 4079 - DNA, 1674 bp, Homosapiens
gatccattttaagaagatttattcctctatgatggagaagtatgaaaaaattgggaaaattggagaaggatcctatggagttgttttcaaatgtagaaacagggacacgggtcagattgtggccatcaagaagtttctggaatcagaagatgaccctgtcataaagaaaattgcccttcgggaaatccgaatgctcaagcaactcaagcatcccaaccttgttaacctcctggaagtcttcaggaggaaacggaggcttcacctggtgtttgaatattgtgaccacacagttctccatgagttggacagataccaaagaggggtaccagaacatctcgtgaagagcataacttggcagacactgcaagctgtaaatttttgccataaacacaattgcatacatagagacgtgaagccagaaaatatcctcatcacgaaacattccgtgattaagctttgtgactttggatttgctcggcttttgactggaccgagtgactactatacagactacgtggctaccaggtggtaccgctcccctgagctgctggtgggggacacgcagtacggccccccggtggatgtttgggcaattggctgtgtctttgctgagctgctgtcaggagtgcctctgtggccaggaaaatcggatgtggatcagctgtatctgattaggaagaccttgggggatctcattcctaggcaccagcaagtgtttagcacgaatcagtacttcagtggagtgaaaattccagaccctgaagatatggaaccacttgaattaaaattcccaaacatctcttatcctgccctggggctcctaaagggctgtctccacatggaccctactcaaaggctgacatgtgaacagctgttgcatcacccatattttgaaaacatcagagaaatagaggatttggcaaaagaacacaacaaaccaacaaggaagaccctaagaaagagccgaaagcaccactgctttacagaaacatccaagttgcagtacctaccccagctaactggcagcagcatccttccagctttggataataagaagtactactgtgataccaagaaacttaactaccgttttccaaacatttaaaggagctaggagacatgattttaaaaaaggaatcaatagatgctttgaagaaaataaaacttatacagttgattgaaaacaattacaatgttgaaaacacaccaggagaaaacataagcaagaaactgggaggccaactggcaagatatgaagggaaattccagatccagtcttccatgcttgatgatggtgtccagaaaagaaaaaacctgtttggagttgcacttgtatttcagtttatgtaagtagccgaacttatggacagaatatgaactgtcccatacctctggcaaaactagatgatatcaaaaagatttatgcttcagttgtaccacatgccacacaagaaaaatgaaccacaaaatgcccatatatatttcctcggatctctgttgcctgagtcctatctcctgcctctcagattgtttcagcatcatatttaagatagttctatttcttgaaatcaaaatgtttaaaatcccatttcctgcttgctctatttcttgatttttatattttaaaacattttgagggtaacacttaggttcaaaatatttaaaagcatatga

SEQ ID NO: 4080 - protein, 358 aa, Homosapiens; identical to SEQ ID NO: 570

SEQ ID NO: 4081 - DNA, 2948 bp, Homosapiens
agagtaatttcccgccttgtgactctcgtgtctccaaagaagaagcccaactccctttcccaacacctagcagctacggtgcagactcctccaaccagacttacgcacacaagtctcagtctgaaagagagcagcacaaggaagtacgtgctgtcctgaaccattgttctggcttggatggtggagaggagtctggcctttgtgggacaagtacccgcattgatgctggcactgggaacgggacggatgataaagtcactgatcagcacagacacagaagatgcctccaagggaccaaagggaataaccgcggttctgaggtgtggggactgctgttgcagggaaatgtggaccgctcaggaggggctcctagcgcaggcgtcttgctccgcagacgcggttacagctgcgctttgcacggcctgcggaagtttgcaaatctagcaggtctgctctcccggcagcaggactcggcccgcggcgtgagccaccattctcggctgaagatccattttaagaagatttattcctctatgatggagaagtatgaaaaaattgggaaaattggagaaggatcctatggagttgttttcaaatgtagaaacagggacacgggtcagattgtggccatcaagaagtttctggaatcagaagatgaccctgtcataaagaaaattgcccttcgggaaatccgaatgctcaaggccccaagcccctatgctgctgaaccttctctctgtggaatgaaaatggtaagaagaggaaagaaagaatttctgccagcagtggcagaaaaagtagatgctcctagcggagttggaggtcaaggacaggacagtgtcactgtgggatccctgggcagacgttctacctatggcagaaaacaagaaaaacaagtgagacaaagagaaggaatcatctactgctatgtggcagttttgcttcggatttactattttgaccagggttgtgttgccagggaggaagagcagtttcaggagcttgtgtttggccctttctgccatattggctcttacttcacaggtcatagaaccaatgtgaggccttacattttactactatcacggcccagccccttcaagacggctgctggtacctatgaggcaggtcttgtcattcttgagtgcagttatttcctcgcagagcaagaaccttattgccctactcaggcactgcaacaacctcatcctattataggtccgtgggccctagaaggaggtggggtagaatctaaggaggacaggcatccccctcctaaggaggcacctgcatcatgtgagggatttttaaggtctgcagtgccgaagcaagcttacaccccattcaaaaccagccctgacaaaaggcttagtgactgtgttgctacacctccctgggctcctcccaccccacttatcatcagcagtggggtccttgttgccatctgctccatgattgatccagttccagaattccattctgaaggcctgctagctaaggccacttcaggaagtgctggaatcctggtatggatatttttatgcaatgatgcttttatttatggaaagtatattctcagaagtggagtgctatgggttcgtggtctccctggcttcaagagtgaagctgcagccctttgccataagtgttacagcagtgcggacccaaagcgtgagcagcagcaagatttattgcaaagagtgaaagaacaaagcttccacagtgtgaatggtgcccaggctagacataaaggttctccaagtccccaccagactcaggagcccagctggcctcacccagtggatcccacaccaggccacaggtggagctgcctgccagtcccatgccgtgcgcccgcactcctcagtccttgggtggtcgatgggaccgggtgctgcggagcagggggcggttctgatcgtggaggctcggccgcgcaggagcccacgcaactcaagcatcccaaccttgttaacctcctggaagtcttcaggaggaaacggaggcttcacctggtgtttgaatattgtgaccacacagttctccatgagttggacagataccaaagaggcatatgcaacatctttgtgtgcactggaagaagacttggtgagcacacagaggccttgtccaagaaaaagaaaaaaggaggagggggtcccttcctgaagttgagggcagcctcttgcaggatcaccctgtttaagaatgttggctgtgggctggaaaccacaggtgatttgagtctaaattctggagggggggccgcatctcgaggggtggctgcagctctcagagcacttgtgtgtgggacagagctgacatctagcgactctccccagaggtgcatacatagagacgtgaagccagaaaatatcctcatcacgaaacattccgtgattaagctttgtgactttggatttgctcggcttttgactggaccgagtgactactatacagactacgtggctaccaggtggtaccgctcccctgagctgctggtgggggacacgcagtacggccccccggtggatgtttgggcaattggctgtgtctttgctgagctgctgtcaggagtgcctctgtggccaggaaaatcggatgtggatcagctgtatctgattaggaagaccttgggggatctcattcctaggcaccagcaagtgtttagcacgaatcagtacttcagtggagtgaaaattccagaccctgaagatatgtccctctgcctgtcagtaaccctgacagagggaggcctgcttgcttctggggctgtgaaacgctcacagatgggctccagcgtatcacaggcaaccagttggcctcatccagacattgttgctgagacagcagagctcgatgatatagcaatggcacgtcaaaccccagtgatgctcagattcaaccgacagaaagaacaagagaaatatttaagctatggagcatga

SEQ ID NO: 4082 - protein, 804 aa, Homosapiens
MMEKYEKIGKIGEGSYGVVFKCRNRDTGQIVAIKKFLESEDDPVIKKIALREIRMLKAPSPYAAEPSLCGMKMVRRGKKEFLPAVAEKVDAPSGVGGQGQDSVTVGSLGRRSTYGRKQEKQVRQREGIIYCYVAVLLRIYYFDQGCVAREEEQFQELVFGPFCHIGSYFTGHRTNVRPYILLLSRPSPFKTAAGTYEAGLVILECSYFLAEQEPYCPTQALQQPHPIIGPWALEGGGVESKEDRHPPPKEAPASCEGFLRSAVPKQAYTPFKTSPDKRLSDCVATPPWAPPTPLIISSGVLVAICSMIDPVPEFHSEGLLAKATSGSAGILVWIFLCNDAFIYGKYILRSGVLWVRGLPGFKSEAAALCHKCYSSADPKREQQQDLLQRVKEQSFHSVNGAQARHKGSPSPHQTQEPSWPHPVDPTPGHRWSCLPVPCRAPALLSPWVVDGTGCCGAGGGSDRGGSAAQEPTQLKHPNLVNLLEVFRRKRRLHLVFEYCDHTVLHELDRYQRGICNIFVCTGRRLGEHTEALSKKKKKGGGGPFLKLRAASCRITLFKNVGCGLETTGDLSLNSGGGAASRGVAAALRALVCGTELTSSDSPQRCIHRDVKPENILITKHSVIKLCDFGFARLLTGPSDYYTDYVATRWYRSPELLVGDTQYGPPVDVWAIGCVFAELLSGVPLWPGKSDVDQLYLIRKTLGDLIPRHQQVFSTNQYFSGVKIPDPEDMSLCLSVTLTEGGLLASGAVKRSQMGSSVSQATSWPHPDIVAETAELDDIAMARQTPVMLRFNRQKEQEKYLSYGA

SEQ ID NO: 4083 - DNA, 501 bp, Homosapiens
aaaggcctcggagggccgccctccgtccatgggagctgtcctgaccgcgggccgagtcctgctgccgggagagcagacctgctagatttgcaaacttccgcaggccgtgcaaagcgcagctgtaaccgcgtctgcggagcaagacgcctgcgctaggagcccctcctgagcggtccacatttccctgcaacagcagtccccacacctcagaaccgcggttattccctttggtcccttggaggcatcttctgtgtctgtgctgatcagtgctgcggcgtcagtgaatgaatgagagggagaaaggaaagaagaggaaggcgtgactgcagaaattgcttaaattttgccttttccagaatgtcatgaaaatggaatcagaccgtatgtagccttttgaggatagaggatctcccccaccaccccaactccagtgagctttcagatgagattgtagccccagatgacaatagggagtctcgctctgtcacccaggctggagtg

SEQ ID NO: 4084 - protein, 44 aa, Homosapiens
KWNQTVCSLLRIEDLPHHPNSSELSDEIVAPDDNRESRSVTQAG

SEQ ID NO: 4085 - DNA, 5325 bp, Homosapiens
ggagttcatccttcatacagcttatttttgggactgtgccctctacctaagcagcgctaaattcaaatccttgttccgttcacctgttgagactgttactttctctgtgggctccattttcttgtgtcctagtttggaaagtgcccccaggcagaaagtcagggtaaatatggctcttaccaccatgtattttccttcttttaagaatcacagacttacggtgtctgtggtgcattgcctccaaacagttgctttagtttgtacacacacaaacatgcagacatatatatgtttacatgtagatagctgtttatacagaagggtaagtccaatttctgttatttaaaaatggccaggtgtggtggctcacacctgtaatcccagcaccttgggaggcttaggtgggcagatcacctggggtcaggaactcctgatgtcaggaaacctcatgagatggtgaaaccccatctctactgaaaatggaagaattagccaggcgtggtggcgggcacctgtagtcccagctactcgggaggctgaggcaagagaatagcttgaactctggaggcggaggttatagtgagctgagattgcgccactgcactccagcctgggcgacagagtgtgagactccatctcaacaacaacaacaacaacaaaaaagtaatatattattttcacattttatgtaatgtgaaatgcagctctagacctgcttgccagtgtttctggttgtcacaaaaacaaactttagctcatctctgtttcaaaagactaaagaggttctttatgaatagtagtagttcttgaattcagatgttttttaattacgttaagtcattaatgtcccaggactttttattttagattattttttaaagtagatactgtattttatggaatgtcttctaaacttttattgaaaaatttatgacatactgtttttgtttaatgtgatgaattatgtcagtactttgtgtttgctttttacaaatcttgtttttaggaataaggacaactggatcctatttgaaagcgctttttaaaaatattttgtttcctaagattgtatttaggaattttgcatctctatgatgcaagtatgagtgtttaaaaaaatttggggggcttttaatcacattagattttagaatttttaaattttaaatactttatgaggaagtaataaaccctccttttctatgttttagaatattttatagaaaagaagttactctttgaatattttgaataactctgaagtcagtatgactaggccaaataaaatacatatttagcaaaatatatcagattcctgaatgccattgtgacatttaattgaacagaagtcatttgttctttttagataatttttaggtagtttttcttagttcatctctgccatgaagctgtagcttaaaccgtctcaaaacagagtctacagcatagagaaaattcttaaagtttttacttagtcatttatttttgatgaatttttaaaaatctcttttatacaaaaagaactgtttaatttcctgattccaaacaagaattaagtagagatgttaggaagatcccactttgttatttacttttggtaagcataacaaaggggtactcttgtagtcaaaaaataacatattttttgtcttctttcccctcttctttctccctcccccaccccatatacaaacttgtcattacatttctgagatcaaccctttgagatgctgagtttgtacatacctgttatatattttgcagttgacaaattacaatttgaacctcctctgagaaaagaaacagaagcacgagatgaaatgggattgtcatcagacccaaatttcatgttacagtggaatccttttgttgatggtgcaaatactggcaaatcaacctcaaaacgtgcaataccacctcccctacctcctaagccaaggataagcagttaccctgaagacaactttccggatgaagaaaaagcatcaaccataaaacattgtcctgattcagaaagcagagctccccaaattctcagaagacagagtagcccaagttgtgggcctgtggcagagacttcttctattggaaatggtgatggtatttcaaaactgatgagtgaaaatacagaaggatcagcacaagcaccacagttaccacgaaaaaaggacaaacgagacttccctaaaccagccatcaatggccttccacccaccccaaaagttctgatgggagcatgcttttcaaaagtttttgatggctgtcctttgaaaattaattgtgcaacatcctggatacatcctgatacaaaagatcagtacattatttttggaactgaagatggtatttacacactgaatctcaatgagctacatgaggcaacgatggaacagttatttccacggaagtgtacttggctgtatgttatcaataatactttaatgtcattatcaggaaaaacctttcagctctactctcacaatcttatagctttgtttgaacatgccaaaaaaccaggattagctgcccatattcaaactcacaggtttccagaccgaatactaccaagaaaattcgctttaacaacaaagattcctgatacaaaaggctgccacaaatgttgcatagtcagaaacccttacacgggacataaatacctctgtggagctttacagtctggaattgttttacttcagtggtatgagccaatgcagaaattcatgttgataaagcactttgattttcctttgccaagtcctttgaatgtttttgaaatgctggtgatacctgaacaggaataccctatggtctgtgtagctattagcaaaggcactgaatcgaatcaggtagttcagtttgagacaatcaatttgaactctgcatcttcatggtttacagaaattggtgcaggcagccagcagttagattccattcatgtaacacagttggagagagataccgttttagtgtgtttagacaaatttgtgaaaattgtaaatctacaaggaaaattaaaatcaagtaagaaactggcctctgagttaagttttgattttcgcattgaatctgtagtatgccttcaagacagtgtgttggctttctggaaacatgggatgcagggtaaaagcttcaagtcagatgaggttacccaggagatttcagatgaaacaagagttttccgcttattaggatcagacagggttgtcgttttggaaagtaggccaacagaaaatcctactgcacacagcaatctctacatcttggctggacatgaaaatagttactaagcaacagaaactgatctcaaatgacaggaaaatgaatatactccattgaaaggaaaaataaggaaattcaatacaaactgcactatgatttgctttaactattatgggttatattgcaaatgatctgtactttagggtagaattcaatattttctgcagctggaaacagctagtctatctcttgccactgtgtggtggttatatcaagtttgcttaataaaagctatgagacaaatagtcctctagttccaggaaacacagtctttttttaaaaaaaacaatgtttgtaacaagggtgccatggtatttttagataactcgtgattatcttaagagaggtaaatttagtgatcattttatatcatgtcttattccttcttaatgaacataatttgttaaattctcaagcaaggttttcacttttatattggccattctgtatgtttttgtaaaacagaatatttaatccttatttattaatctcttgctggagtggtgtaatgtatctaacttttagcaaaggagggttgcagagcagcttaaattttttttataatgtataagaattttgtttatcttttaagagtagtaaagtactttgagtgtttgggggttcaacacacacatgcaattttgcttaacaaaagtattttataatacagtttcatacagaattaccttaaaagggagtcttatgttttcaactacagatagttgtaagggatcatacagaagatattgatgatagttgaaatattcttagaaggggtgtgtatgtctagctgtgtctaccatgtgtatgtattcttgacaagcagtataaaatacctgtgatttttctttacattagggataatgcataaggaattaatcttcatatatattatcatccctaatgtagcagggggaagtatttaattgcccatgatatgtattttacttatactatgccagagaggaaactataaagtaattacacatgtaatcttgggtttttcacatatgtaggtattcattttgagtaggttgaagaagaaaaaaaatatttaaatgaattgaattcctgatgggatagtatcaataagtatttaaaagccagtattctaaaaataataaagggtagggtcatttttgagtttgtttttcttttgctattgttaatattcaaaattaaagtgttacattggtacctgttgtcttaatgcatttattgagaacagcattgagatgatgaacaaggggttagcaatagcaaactctataattattttgactaattacttaagaggaaaacagtataagtatctcattcagtatttagcaattctgtaaaataagtattatctctatttttcagatgaggaagtaagggtttagcaaggttaagagatctatccaatttacacagcaagttagtagttgagcctgaccatgagtcttctgactctgttcttttcactatgcaatacgcaaacaataaaatgttatacaaatggaatataaagttatttattctttaaaaatgcacatatgatatgatttcagtaagtgtgtggctgtttattttggctatgttaagaatacgggatacagtagatgacaggggaaccatcctcaaaacaggggacatttacatgatggataagaaagccagaatcctccttttcttactgaatcctggcagccagatctttaccatcccatggtggaataccgaagagtcttctctgtgaaatctgaccaatgcaagtgaaaaggcctcattaagatcttgatgtcagacatgtcccggctaaactgcccagctagatgacactacagtgaaaatcatagttggcaatcccaccatcccacgcattatgtctagaccttgcagttagtcttttagtcctgtgctcttaaaaatgagcaaacaaccaaggattacaaataaatgaaagagaaaaaacagtctggggaaaacagaggaaacaggctatgaagggtaaggagaacatcaaaagaaaaagtattttcagaaggatgttgcaaccatgag

SEQ ID NO: 4086 - protein, 519 aa, Homosapiens
MLSLYIPVIYFAVDKLQFEPPLRKETEARDEMGLSSDPNFMLQWNPFVDGANTGKSTSKRAIPPPLPPKPRISSYPEDNFPDEEKASTIKHCPDSESRAPQILRRQSSPSCGPVAETSSIGNGDGISKLMSENTEGSAQAPQLPRKKDKRDFPKPAINGLPPTPKVLMGACFSKVFDGCPLKINCATSWIHPDTKDQYIIFGTEDGIYTLNLNELHEATMEQLFPRKCTWLYVINNTLMSLSGKTFQLYSHNLIALFEHAKKPGLAAHIQTHRFPDRILPRKFALTTKIPDTKGCHKCCIVRNPYTGHKYLCGALQSGIVLLQWYEPMQKFMLIKHFDFPLPSPLNVFEMLVIPEQEYPMVCVAISKGTESNQVVQFETINLNSASSWFTEIGAGSQQLDSIHVTQLERDTVLVCLDKFVKIVNLQGKLKSSKKLASELSFDFRIESVVCLQDSVLAFWKHGMQGKSFKSDEVTQEISDETRVFRLLGSDRVVVLESRPTENPTAHSNLYILAGHENSY

SEQ ID NO: 4087 - DNA, 4896 bp, Homosapiens
ggcgccgacccatgctggctgggaacgtgtctcccggtgacgcagccccgggtggggaacgtggtgcggcggcggcggcggcggcgactgtacgcgcctccgccgcccccgagaggacgcgccgtgcagcggctgagtggcggcggcggcgacggcaaacccggagctgccggccggcgcgcgggaggaggacgcgggtgcggtctaggaaacggagctgcgggcggaggctccatgttgggaagcggcgccgttcgtgcttgttagcgggaatccgggagccgcggggtgagctggcgggggccgggccctaagtgaagatggaggccccgctgcggcctgccgcggacatcctgaggcggaacccgcagcaggactacgaactcgtccagagggtcggcagcggcacctacggggacgtctataaggccagaaatgtacacacaggagagctggctgcagtaaaaatcattaaattggagcctggagatgatttttctttgattcaacaagaaatatttatggttaaagaatgtaaacattgtaacatcgttgcctactttgggagttatcttagtcgggaaaaactatggatttgtatggaatactgtggtggcggatcacttcaagatatttaccatgttactggaccattatcagaattgcaaatagcctatgtatgcagagaaaccttacagggtcttgcctatttgcatactaaaggcaaaatgcatagagatatcaaaggtgctaatattttattgacagaccatggcgatgtaaaattagctgactttggtgtggctgcaaaaataacagctaccattgcaaaacgaaaatctttcattggcaccccttactggatggccccagaagttgcagcagtagagaagaatggtggctacaaccaactctgtgatatctgggcagtaggaataacagcaattgaacttggagaacttcagccacctatgtttgatctccacccaatgagggctctcttcttaatgtcaaaaagtaattttcagcctccaaaactaaaggacaaaacaaaatggtcatcaacattccataattttgtcaaaatagcactaaccaaaaacccaaaaaaaagaccaactgctgaaagacttctgactcacacttttgttgcacagccaggtctctctagagccctagcagttgaactgttagacaaagtgaacaatccagataaccacgcacattacactgaagcagatgacgatgactttgagccccatgcaatcattcgtcataccattagatctacaaacaggaatgccagagctgaacggacagcttcagaaataaattttgacaaattacaatttgaacctcctctgagaaaagaaacagaagcacgagatgaaatgggattgtcatcagacccaaatttcatgttacagtggaatccttttgttgatggtgcaaatactggcaaatcaacctcaaaacgtgcaataccacctcccctacctcctaagccaaggataagcagttaccctgaagacaactttccggatgaagaaaaagcatcaaccataaaacattgtcctgattcagaaagcagagctccccaaattctcagaagacagagtagcccaagttgtgggcctgtggcagagacttcttctattggaaatggtgatggtatttcaaaactgatgagtgaaaatacagaaggatcagcacaagcaccacagttaccacgaaaaaaggacaaacgagacttccctaaaccagccatcaatggccttccacccaccccaaaagttctgatgggagcatgcttttcaaaagtttttgatggctgtcctttgaaaattaattgtgcaacatcctggatacatcctgatacaaaagatcagtacattatttttggaactgaagatggtatttacacactgaatctcaatgagctacatgaggcaacgatggaacagttatttccacggaagtgtacttggctgtatgttatcaataatactttaatgtcattatcaggaaaaacctttcagctctactctcacaatcttatagctttgtttgaacatgccaaaaaaccaggattagctgcccatattcaaactcacaggtttccagaccgaatactaccaagaaaattcgctttaacaacaaagattcctgatacaaaaggctgccacaaatgttgcatagtcagaaacccttacacgggacataaatacctctgtggagctttacagtctggaattgttttacttcagtggtatgagccaatgcagaaattcatgttgataaagcactttgattttcctttgccaagtcctttgaatgtttttgaaatgctggtgatacctgaacaggaataccctatggtctgtgtagctattagcaaaggcactgaatcgaatcaggtagttcagtttgagacaatcaatttgaactctgcatcttcatggtttacagaaattggtgcaggcagccagcagttagattccattcatgtaacacagttggagagagataccgttttagtgtgtttagacaaatttgtgaaaattgtaaatctacaaggaaaattaaaatcaagtaagaaactggcctctgagttaagttttgattttcgcattgaatctgtagtatgccttcaagacagtgtgttggctttctggaaacatgggatgcagggtaaaagcttcaagtcagatgaggttacccaggagatttcagatgaaacaagagttttccgcttattaggatcagacagggttgtcgttttggaaagtaggccaacagaaaatcctactgcacacagcaatctctacatcttggctggacatgaaaatagttactaagcaacagaaactgatctcaaatgacaggaaaatgaatatactccattgaaaggaaaaataaggaaattcaatacaaactgcactatgatttgctttaactattatgggttatattgcaaatgatctgtactttagggtagaattcaatattttctgcagctggaaacagctagtctatctcttgccactgtgtggtggttatatcaagtttgcttaataaaagctatgagacaaatagtcctctagttccaggaaacacagtctttttttaaaaaaaacaatgtttgtaacaagggtgccatggtatttttagataactcgtgattatcttaagagaggtaaatttagtgatcattttatatcatgtcttattccttcttaatgaacataatttgttaaattctcaagcaaggttttcacttttatattggccattctgtatgtttttgtaaaacagaatatttaatccttatttattaatctcttgctggagtggtgtaatgtatctaacttttagcaaaggagggttgcagagcagcttaaattttttttataatgtataagaattttgtttatcttttaagagtagtaaagtactttgagtgtttgggggttcaacacacacatgcaattttgcttaacaaaagtattttataatacagtttcatacagaattaccttaaaagggagtcttatgttttcaactacagatagttgtaagggatcatacagaagatattgatgatagttgaaatattcttagaaggggtgtgtatgtctagctgtgtctaccatgtgtatgtattcttgacaagcagtataaaatacctgtgatttttctttacattagggataatgcataaggaattaatcttcatatatattatcatccctaatgtagcagggggaagtatttaattgcccatgatatgtattttacttatactatgccagagaggaaactataaagtaattacacatgtaatcttgggtttttcacatatgtaggtattcattttgagtaggttgaagaagaaaaaaaatatttaaatgaattgaattcctgatgggatagtatcaataagtatttaaaagccagtattctaaaaataataaagggtagggtcatttttgagtttgtttttcttttgctattgttaatattcaaaattaaagtgttacattggtacctgttgtcttaatgcatttattgagaacagcattgagatgatgaacaaggggttagcaatagcaaactctataattattttgactaattacttaagaggaaaacagtataagtatctcattcagtatttagcaattctgtaaaataagtattatctctatttttcagatgaggaagtaagggtttagcaaggttaagagatctatccaatttacacagcaagttagtagttgagcctgaccatgagtcttctgactctgttcttttcactatgcaatacgcaaacaataaaatgttatacaaatggaatataaagttatttattctttaaaaatgcacatatgatatgatttcagtaagtgtgtggctgtttattttggctatgttaagaatacgggatacagtagatgacaggggaaccatcctcaaaacaggggacatttacatgatggataagaaagccagaatcctccttttcttactgaatcctggcagccagatctttaccatcccatggtggaataccgaagagtcttctctgtgaaatctgaccaatgcaagtgaaaaggcctcattaagatcttgatgtcagacatgtcccggctaaactgcccagctagatgacactacagtgaaaatcatagttggcaatcccaccatcccacgcattatgtctagaccttgcagttagtcttttagtcctgtgctcttaaaaatgagcaaacaaccaaggattacaaataaatgaaagagaaaaaacagtctggggaaaacagaggaaacaggctatgaagggtaaggagaacatcaaaagaaaaagtattttcagaaggatgttgcaaccatgag

SEQ ID NO: 4088 - protein, 845 aa, Homosapiens
MEAPLRPAADILRRNPQQDYELVQRVGSGTYGDVYKARNVHTGELAAVKIIKLEPGDDFSLIQQEIFMVKECKHCNIVAYFGSYLSREKLWICMEYCGGGSLQDIYHVTGPLSELQIAYVCRETLQGLAYLHTKGKMHRDIKGANILLTDHGDVKLADFGVAAKITATIAKRKSFIGTPYWMAPEVAAVEKNGGYNQLCDIWAVGITAIELGELQPPMFDLHPMRALFLMSKSNFQPPKLKDKTKWSSTFHNFVKIALTKNPKKRPTAERLLTHTFVAQPGLSRALAVELLDKVNNPDNHAHYTEADDDDFEPHAIIRHTIRSTNRNARAERTASEINFDKLQFEPPLRKETEARDEMGLSSDPNFMLQWNPFVDGANTGKSTSKRAIPPPLPPKPRISSYPEDNFPDEEKASTIKHCPDSESRAPQILRRQSSPSCGPVAETSSIGNGDGISKLMSENTEGSAQAPQLPRKKDKRDFPKPAINGLPPTPKVLMGACFSKVFDGCPLKINCATSWIHPDTKDQYIIFGTEDGIYTLNLNELHEATMEQLFPRKCTWLYVINNTLMSLSGKTFQLYSHNLIALFEHAKKPGLAAHIQTHRFPDRILPRKFALTTKIPDTKGCHKCCIVRNPYTGHKYLCGALQSGIVLLQWYEPMQKFMLIKHFDFPLPSPLNVFEMLVIPEQEYPMVCVAISKGTESNQVVQFETINLNSASSWFTEIGAGSQQLDSIHVTQLERDTVLVCLDKFVKIVNLQGKLKSSKKLASELSFDFRIESVVCLQDSVLAFWKHGMQGKSFKSDEVTQEISDETRVFRLLGSDRVVVLESRPTENPTAHSNLYILAGHENSY

SEQ ID NO: 4089 - DNA, 4232 bp, Homosapiens
ggacgcgccgtgcagcggctgagtggcggcggcggcgacggcaaacccggagctgccggccggcgcgcgggaggaggacgcgggtgcggtctaggaagtaggtcccgggctccgcgctcaacaaagacggggccgcccccattagacggagctgcgggcggaggctccatgttgggaagcggcgccgttcgtgcttgttagcgggaatccgggagccgcggggtgagctggcgggggccgggccctaagtgaagatggaggccccgctgcggcctgccgcggacatcctgaggcggaacccgcagcaggactacgaactcgtccagagggtcggcagcggcacctacggggacgtctataaggggagatgatttttctttgattcaacaagaaatatttatggttaaagaatgtaaacattgtaacatcgttgcctactttgggagttatcttagtcgggaaaaactatggatttgtatggaatactgtggtggcggatcacttcaagatatttaccatgttactggaccattatcagaattgcaaatagcctatgtatgcagagaaaccttacagggtcttgcctatttgcatactaaaggcaaaatgcatagagatatcaaaggtgctaatattttattgacagaccatggcgatgtaaaattagctgactttggtgtggctgcaaaaataacagctaccattgcaaaacgaaaatctttcattggcaccccttactggatggccccagaagttgcagcagtagagaagaatggtggctacaaccaactctgtgatatctgggcagtaggaataacagcaattgaacttggagaacttcagccacctatgtttgatctccacccaatgagggctctcttcttaatgtcaaaaagtaattttcagcctccaaaactaaaggacaaaacaaaatggtcatcaacattccataattttgtcaaaatagcactaaccaaaaacccaaaaaaaagaccaactgctgaaagacttctgactcacacttttgttgcacagccaggtctctctagagccctagcagttgaactgttagacaaagtgaacaatccagataaccacgcacattacactgaagcagatgacgatgactttgagccccatgcaatcattcgtcataccattagatctacaaacaggaatgccagagctgaacggacagcttcagaaataaattttgacaaattacaatttgaacctcctctgagaaaagaaacagaagcacgagatgaaatgggattgtcatcagacccaaatttcatgttacagtggaatccttttgttgatggtgcaaatactggcaaatcaacctcaaaacgtgcaataccacctcccctacctcctaagccaaggataagcagttaccctgaagacaactttccggatgaagaaaaagcatcaaccataaaacattgtcctgattcagaaagcagagctccccaaattctcagaagacagagtagcccaagttgtgggcctgtggcagagacttcttctattggaaatggtgatggtatttcaaaactgatgagtgaaaatacagaaggatcagcacaagcaccacagttaccacgaaaaaaggacaaacgagacttccctaaaccagccatcaatggccttccacccaccccaaaagttctgatgggagcatgcttttcaaaagtttttgatggctgtcctttgaaaattaattgtgcaacatcctggatacatcctgatacaaaagatcagtacattatttttggaactgaagatggtatttacacactgaatctcaatgagctacatgaggcaacgatggaacagttatttccacggaagtgtacttggctgtatgttatcaataatactttaatgtcattatcaggaaaaacctttcagctctactctcacaatcttatagctttgtttgaacatgccaaaaaaccaggattagctgcccatattcaaactcacaggtttccagaccgaatactaccaagaaaattcgctttaacaacaaagattcctgatacaaaaggctgccacaaatgttgcatagtcagaaacccttacacgggacataaatacctctgtggagctttacagtctggaattgttttacttcagtggtatgagccaatgcagaaattcatgttgataaagcactttgattttcctttgccaagtcctttgaatgtttttgaaatgctggtgatacctgaacaggaataccctatggtctgtgtagctattagcaaaggcactgaatcgaatcaggtagttcagtttgagacaatcaatttgaactctgcatcttcatggtttacagaaattggtgcaggcagccagcagttagattccattcatgtaacacagttggagagagataccgttttagtgtgtttagacaaatttgtgaaaattgtaaatctacaaggaaaattaaaatcaagtaagaaactggcctctgagttaagttttgattttcgcattgaatctgtagtatgccttcaagacagtgtgttggctttctggaaacatgggatgcagggtaaaagcttcaagtcagatgaggttacccaggagatttcagatgaaacaagagttttccgcttattaggatcagacagggttgtcgttttggaaagtaggccaacagaaaatcctactgcacacagcaatctctacatcttggctggacatgaaaatagttactaagcaacagaaactgatctcaaatgacaggaaaatgaatatactccattgaaaggaaaaataaggaaattcaatacaaactgcactatgatttgctttaactattatgggttatattgcaaatgatctgtactttagggtagaattcaatattttctgcagctggaaacagctagtctatctcttgccactgtgtggtggttatatcaagtttgcttaataaaagctatgagacaaatagtcctctagttccaggaaacacagtctttttttaaaaaaaacaatgtttgtaacaagggtgccatggtatttttagataactcgtgattatcttaagagaggtaaatttagtgatcattttatatcatgtcttattccttcttaatgaacataatttgttaaattctcaagcaaggttttcacttttatattggccattctgtatgtttttgtaaaacagaatatttaatccttatttattaatctcttgctggagtggtgtaatgtatctaacttttagcaaaggagggttgcagagcagcttaaattttttttataatgtataagaattttgtttatcttttaagagtagtaaagtactttgagtgtttgggggttcaacacacacatgcaattttgcttaacaaaagtattttataatacagtttcatacagaattaccttaaaagggagtcttatgttttcaactacagatagttgtaagggatcatacagaagatattgatgatagttgaaatattcttagaaggggtgtgtatgtctagctgtgtctaccatgtgtatgtattcttgacaagcagtataaaatacctgtgatttttctttacattagggataatgcataaggaattaatcttcatatatattatcatccctaatgtagcagggggaagtatttaattgcccatgatatgtattttacttatactatgccagagaggaaactataaagtaattacacatgtaatcttgggtttttcacatatgtaggtattcattttgagtaggttgaagaagaaaaaaaatatttaaatgaattgaattcctgatgggatagtatcaataagtatttaaaagccagtattctaaaaataataaagggtagggtcatttttgagtttgtttttcttttgctattgttaatattcaaaattaaagtgttacattggtacctgttgtcttaatgcatttattgagaacagcattgagatgatgaacaaggggttagcaatagcaaactctataattattttgactaattacttaagaggaaaacagtataagtatctcattcagtatttagcaattctgtaaaataagtattatctctatttttcagatgaggaagtaagggtttagcaaggttaagagatctatccaatttacacagcaagttagtagttgagcctgaccatgagtcttctgactctgttcttttcactatgcaatacgcaaacaataaaatgttatacaaatgg

SEQ ID NO: 4090 - protein, 778 aa, Homosapiens
MVKECKHCNIVAYFGSYLSREKLWICMEYCGGGSLQDIYHVTGPLSELQIAYVCRETLQGLAYLHTKGKMHRDIKGANILLTDHGDVKLADFGVAAKITATIAKRKSFIGTPYWMAPEVAAVEKNGGYNQLCDIWAVGITAIELGELQPPMFDLHPMRALFLMSKSNFQPPKLKDKTKWSSTFHNFVKIALTKNPKKRPTAERLLTHTFVAQPGLSRALAVELLDKVNNPDNHAHYTEADDDDFEPHAIIRHTIRSTNRNARAERTASEINFDKLQFEPPLRKETEARDEMGLSSDPNFMLQWNPFVDGANTGKSTSKRAIPPPLPPKPRISSYPEDNFPDEEKASTIKHCPDSESRAPQILRRQSSPSCGPVAETSSIGNGDGISKLMSENTEGSAQAPQLPRKKDKRDFPKPAINGLPPTPKVLMGACFSKVFDGCPLKINCATSWIHPDTKDQYIIFGTEDGIYTLNLNELHEATMEQLFPRKCTWLYVINNTLMSLSGKTFQLYSHNLIALFEHAKKPGLAAHIQTHRFPDRILPRKFALTTKIPDTKGCHKCCIVRNPYTGHKYLCGALQSGIVLLQWYEPMQKFMLIKHFDFPLPSPLNVFEMLVIPEQEYPMVCVAISKGTESNQVVQFETINLNSASSWFTEIGAGSQQLDSIHVTQLERDTVLVCLDKFVKIVNLQGKLKSSKKLASELSFDFRIESVVCLQDSVLAFWKHGMQGKSFKSDEVTQEISDETRVFRLLGSDRVVVLESRPTENPTAHSNLYILAGHENSY

SEQ ID NO: 4091 - DNA, 4402 bp, Homosapiens
ggcgccgacccatgctggctgggaacgtgtctcccggtgacgcagccccgggtggggaacgtggtgcggcggcggcggcggcggcgactgtacgcgcctccgccgcccccgagaggacgcgccgtgcagcggctgagtggcggcggcggcgacggcaaacccggagctgccggccggcgcgcgggaggaggacgcgggtgcggtctaggaagtaggtcccgggctccgcgctcaacaaagacggggccgcccccattagacggagctgcgggcggaggctccatgttgggaagcggcgccgttcgtgcttgttagcgggaatccgggagccgcggggtgagctggcgggggccgggccctaagtgaagatggaggccccgctgcggcctgccgcggacatcctgaggcggaacccgcagcaggactacgaactcgtccagagggtcggcagcggcacctacggggacgtctataaggccagaaatgtacacacaggagagctggctgcagtaaaaatcattaaattggagcctggagatgatttttctttgattcaacaagaaatatttatggttaaagaatgtaaacattgtaacatcgttgcctactttgggagttatcttagtcgggaaaaactatggatttgtatggaatactgtggtggcggatcacttcaagatatttaccatgttactggaccattatcagaattgcaaatagcctatgtatgcagagaaaccttacagggtcttgcctatttgcatactaaaggcaaaatgcatagagatatcaaaggtgctaatattttattgacagaccatggcgatgtaaaattagctgactttggtgtggctgcaaaaataacagctaccattgcaaaacgaaaatctttcattggcaccccttactggatggccccagaagttgcagcagtagagaagaatggtggctacaaccaactctgtgatatctgggcagtaggaataacagcaattgaacttggagaacttcagccacctatgtttgatctccacccaatgagggctctcttcttaatgtcaaaaagtaattttcagcctccaaaactaaaggacaaaacaaaatggtcatcaacattccataattttgtcaaaatagcactaaccaaaaacccaaaaaaaagaccaactgctgaaagacttctgactcacacttttgttgcacagccaggtctctctagagccctagcagttgaactgttagacaaagtgaacaatccagataaccacgcacattacactgaagcagatgacgatgactttgagccccatgcaatcattcgtcataccattagatctacaaacaggaatgccagagctgaacggacagcttcagaaataaattttgacaaattacaatttgaacctcctctgagaaaagaaacagaagcacgagatgaaatgggattgtcatcagacccaaatttcatgttacagtggaatccttttgttgatggtgcaaatactggcaaatcaacctcaaaacgtgcaataccacctcccctacctcctaagccaaggataagcagttaccctgaagacaactttccggatgaagaaaaagcatcaaccataaaacattgtcctgattcagaaagcagagctccccaaattctcagaagacagagtagcccaagttgtgggcctgtggcagagacttcttctattggaaatggtgatggtatttcaaaactgatgagtgaaaatacagaaggatcagcacaagcaccacagttaccacgaaaaaaggacaaacgagacttccctaaaccagccatcaatggccttccacccaccccaaaagttctgatgggagcatgcttttcaaaagtttttgatggctgtcctttgaaaattaattgtgcaacatcctggatacatcctgatacaaaagatcagtacattatttttggaactgaagatggtatttacacactgaatctcaatgagctacatgaggcaacgatggaacagttatttccacggaagtgtacttggctgtatgttatcaataatactttaatgtcattatcaggaaaaacctttcagctctactctcacaatcttatagctttgtttgaacatgccaaaaaaccaggattagctgcccatattcaaactcacaggtttccagaccgaatactaccaagaaaattcgctttaacaacaaagattcctgatacaaaaggctgccacaaatgttgcatagtcagaaacccttacacgggacataaatacctctgtggagctttacagtctggaattgttttacttcagtggtatgagccaatgcagaaattcatgttgataaagcactttgattttcctttgccaagtcctttgaatgtttttgaaatgctggtgatacctgaacaggaataccctatggtctgtgtagctattagcaaaggcactgaatcgaatcaggtagttcagtttgagacaatcaatttgaactctgcatcttcatggtttacagaaattggtgcaggcagccagcagttagattccattcatgtaacacagttggagagagataccgttttagtgtgtttagacaaatttgtgaaaattgtaaatctacaaggaaaattaaaatcaagtaagaaactggcctctgagttaagttttgattttcgcattgaatctgtagtatgccttcaagacagtgtgttggctttctggaaacatgggatgcagggtaaaagcttcaagtcagatgaggttacccaggagatttcagatgaaacaagagttttccgcttattaggatcagacagggttgtcgttttggaaagtaggccaacagaaaatcctactgcacacagcaatctctacatcttggctggacatgaaaatagttactaagcaacagaaactgatctcaaatgacaggaaaatgaatatactccattgaaaggaaaaataaggaaattcaatacaaactgcactatgatttgctttaactattatgggttatattgcaaatgatctgtactttagggtagaattcaatattttctgcagctggaaacagctagtctatctcttgccactgtgtggtggttatatcaagtttgcttaataaaagctatgagacaaatagtcctctagttccaggaaacacagtctttttttaaaaaaaacaatgtttgtaacaagggtgccatggtatttttagataactcgtgattatcttaagagaggtaaatttagtgatcattttatatcatgtcttattccttcttaatgaacataatttgttaaattctcaagcaaggttttcacttttatattggccattctgtatgtttttgtaaaacagaatatttaatccttatttattaatctcttgctggagtggtgtaatgtatctaacttttagcaaaggagggttgcagagcagcttaaattttttttataatgtataagaattttgtttatcttttaagagtagtaaagtactttgagtgtttgggggttcaacacacacatgcaattttgcttaacaaaagtattttataatacagtttcatacagaattaccttaaaagggagtcttatgttttcaactacagatagttgtaagggatcatacagaagatattgatgatagttgaaatattcttagaaggggtgtgtatgtctagctgtgtctaccatgtgtatgtattcttgacaagcagtataaaatacctgtgatttttctttacattagggataatgcataaggaattaatcttcatatatattatcatccctaatgtagcagggggaagtatttaattgcccatgatatgtattttacttatactatgccagagaggaaactataaagtaattacacatgtaatcttgggtttttcacatatgtaggtattcattttgagtaggttgaagaagaaaaaaaatatttaaatgaattgaattcctgatgggatagtatcaataagtatttaaaagccagtattctaaaaataataaagggtagggtcatttttgagtttgtttttcttttgctattgttaatattcaaaattaaagtgttacattggtacctgttgtcttaatgcatttattgagaacagcattgagatgatgaacaaggggttagcaatagcaaactctataattattttgactaattacttaagaggaaaacagtataagtatctcattcagtatttagcaattctgtaaaataagtattatctctatttttcagatgaggaagtaagggtttagcaaggttaagagatctatccaatttacacagcaagttagtagttgagcctgaccatgagtcttctgactctgttcttttcactatgcaatacgcaaacaataaaatgttatacaaatgg

SEQ ID NO: 4092 - protein, 845 aa, Homosapiens; identical to SEQ ID NO: 4088

SEQ ID NO: 4093 - DNA, 4354 bp, Homosapiens
ggcgccgacccatgctggctgggaacgtgtctcccggtgacgcagccccgggtggggaacgtggtgcggcggcggcggcggcggcgactgtacgcgcctccgccgcccccgagaggacgcgccgtgcagcggctgagtggcggcggcggcgacggcaaacccggagctgccggccggcgcgcgggaggaggacgcgggtgcggtctaggaaacggagctgcgggcggaggctccatgttgggaagcggcgccgttcgtgcttgttagcgggaatccgggagccgcggggtgagctggcgggggccgggccctaagtgaagatggaggccccgctgcggcctgccgcggacatcctgaggcggaacccgcagcaggactacgaactcgtccagagggtcggcagcggcacctacggggacgtctataaggccagaaatgtacacacaggagagctggctgcagtaaaaatcattaaattggagcctggagatgatttttctttgattcaacaagaaatatttatggttaaagaatgtaaacattgtaacatcgttgcctactttgggagttatcttagtcgggaaaaactatggatttgtatggaatactgtggtggcggatcacttcaagatatttaccatgttactggaccattatcagaattgcaaatagcctatgtatgcagagaaaccttacagggtcttgcctatttgcatactaaaggcaaaatgcatagagatatcaaaggtgctaatattttattgacagaccatggcgatgtaaaattagctgactttggtgtggctgcaaaaataacagctaccattgcaaaacgaaaatctttcattggcaccccttactggatggccccagaagttgcagcagtagagaagaatggtggctacaaccaactctgtgatatctgggcagtaggaataacagcaattgaacttggagaacttcagccacctatgtttgatctccacccaatgagggctctcttcttaatgtcaaaaagtaattttcagcctccaaaactaaaggacaaaacaaaatggtcatcaacattccataattttgtcaaaatagcactaaccaaaaacccaaaaaaaagaccaactgctgaaagacttctgactcacacttttgttgcacagccaggtctctctagagccctagcagttgaactgttagacaaagtgaacaatccagataaccacgcacattacactgaagcagatgacgatgactttgagccccatgcaatcattcgtcataccattagatctacaaacaggaatgccagagctgaacggacagcttcagaaataaattttgacaaattacaatttgaacctcctctgagaaaagaaacagaagcacgagatgaaatgggattgtcatcagacccaaatttcatgttacagtggaatccttttgttgatggtgcaaatactggcaaatcaacctcaaaacgtgcaataccacctcccctacctcctaagccaaggataagcagttaccctgaagacaactttccggatgaagaaaaagcatcaaccataaaacattgtcctgattcagaaagcagagctccccaaattctcagaagacagagtagcccaagttgtgggcctgtggcagagacttcttctattggaaatggtgatggtatttcaaaactgatgagtgaaaatacagaaggatcagcacaagcaccacagttaccacgaaaaaaggacaaacgagacttccctaaaccagccatcaatggccttccacccaccccaaaagttctgatgggagcatgcttttcaaaagtttttgatggctgtcctttgaaaattaattgtgcaacatcctggatacatcctgatacaaaagatcagtacattatttttggaactgaagatggtatttacacactgaatctcaatgagctacatgaggcaacgatggaacagttatttccacggaagtgtacttggctgtatgttatcaataatactttaatgtcattatcaggaaaaacctttcagctctactctcacaatcttatagctttgtttgaacatgccaaaaaaccaggattagctgcccatattcaaactcacaggtttccagaccgaatactaccaagaaaattcgctttaacaacaaagattcctgatacaaaaggctgccacaaatgttgcatagtcagaaacccttacacgggacataaatacctctgtggagctttacagtctggaattgttttacttcagtggtatgagccaatgcagaaattcatgttgataaagcactttgattttcctttgccaagtcctttgaatgtttttgaaatgctggtgatacctgaacaggaataccctatggtctgtgtagctattagcaaaggcactgaatcgaatcaggtagttcagtttgagacaatcaatttgaactctgcatcttcatggtttacagaaattggtgcaggcagccagcagttagattccattcatgtaacacagttggagagagataccgttttagtgtgtttagacaaatttgtgaaaattgtaaatctacaaggaaaattaaaatcaagtaagaaactggcctctgagttaagttttgattttcgcattgaatctgtagtatgccttcaagacagtgtgttggctttctggaaacatgggatgcagggtaaaagcttcaagtcagatgaggttacccaggagatttcagatgaaacaagagttttccgcttattaggatcagacagggttgtcgttttggaaagtaggccaacagaaaatcctactgcacacagcaatctctacatcttggctggacatgaaaatagttactaagcaacagaaactgatctcaaatgacaggaaaatgaatatactccattgaaaggaaaaataaggaaattcaatacaaactgcactatgatttgctttaactattatgggttatattgcaaatgatctgtactttagggtagaattcaatattttctgcagctggaaacagctagtctatctcttgccactgtgtggtggttatatcaagtttgcttaataaaagctatgagacaaatagtcctctagttccaggaaacacagtctttttttaaaaaaaacaatgtttgtaacaagggtgccatggtatttttagataactcgtgattatcttaagagaggtaaatttagtgatcattttatatcatgtcttattccttcttaatgaacataatttgttaaattctcaagcaaggttttcacttttatattggccattctgtatgtttttgtaaaacagaatatttaatccttatttattaatctcttgctggagtggtgtaatgtatctaacttttagcaaaggagggttgcagagcagcttaaattttttttataatgtataagaattttgtttatcttttaagagtagtaaagtactttgagtgtttgggggttcaacacacacatgcaattttgcttaacaaaagtattttataatacagtttcatacagaattaccttaaaagggagtcttatgttttcaactacagatagttgtaagggatcatacagaagatattgatgatagttgaaatattcttagaaggggtgtgtatgtctagctgtgtctaccatgtgtatgtattcttgacaagcagtataaaatacctgtgatttttctttacattagggataatgcataaggaattaatcttcatatatattatcatccctaatgtagcagggggaagtatttaattgcccatgatatgtattttacttatactatgccagagaggaaactataaagtaattacacatgtaatcttgggtttttcacatatgtaggtattcattttgagtaggttgaagaagaaaaaaaatatttaaatgaattgaattcctgatgggatagtatcaataagtatttaaaagccagtattctaaaaataataaagggtagggtcatttttgagtttgtttttcttttgctattgttaatattcaaaattaaagtgttacattggtacctgttgtcttaatgcatttattgagaacagcattgagatgatgaacaaggggttagcaatagcaaactctataattattttgactaattacttaagaggaaaacagtataagtatctcattcagtatttagcaattctgtaaaataagtattatctctatttttcagatgaggaagtaagggtttagcaaggttaagagatctatccaatttacacagcaagttagtagttgagcctgaccatgagtcttctgactctgttcttttcactatgcaatacgcaaacaataaaatgttatacaaatgg

SEQ ID NO: 4094 - protein, 845 aa, Homosapiens; identical to SEQ ID NO: 4088

SEQ ID NO: 4095 - DNA, 4046 bp, Homosapiens
ggcgccgacccatgctggctgggaacgtgtctcccggtgacgcagccccgggtggggaacgtggtgcggcggcggcggcggcggcgactgtacgcgcctccgccgcccccgagaggacgcgccgtgcagcggctgagtggcggcggcggcgacggcaaacccggagctgccggccggcgcgcgggaggaggacgcgggtgcggtctaggaaacggagctgcgggcggaggctccatgttgggaagcggcgccgttcgtgcttgttagcgggaatccgggagccgcggggtgagctggcgggggccgggccctaagtgaagatggaggccccgctgcggcctgccgcggacatcctgaggcggaacccgcagcaggactacgaactcgtccagagggtcggcagcggcacctacggggacgtctataaggccagaaatgtacacacaggagagctggctgcagtaaaaatcattaaattggagcctggagatgatttttctttgattcaacaagaaatatttatggttaaagaatgtaaacattgtaacatcgttgcctactttgggagttatcttagtcgggaaaaactatggatttgtatggaatactgtggtggcggatcacttcaagatatttaccatgttactggaccattatcagaattgcaaatagcctatgtatgcagagaaaccttacagggtcttgcctatttgcatactaaaggcaaaatgcatagagatatcaaaggtgctaatattttattgacagaccatggcgatgtaaaattagctgactttggtgtggctgcaaaaataacagctaccattgcaaaacgaaaatctttcattggcaccccttactggatggccccagaagttgcagcagtagagaagaatggtggctacaaccaactctgtgatatctgggcagtaggaataacagcaattgaacttggagaacttcagccacctatgtttgatctccacccaatgagggctctcttcttaatgtcaaaaagtaattttcagcctccaaaactaaaggacaaaacaaaatggtcatcaacattccataattttgtcaaaatagcactaaccaaaaacccaaaaaaaagaccaactgctgaaagacttctgactcacacttttgttgcacagccaggtctctctagagccctagcagttgaactgttagacaaagtgaacaatccagataaccacgcacattacactgaagcagatgacgatgactttgagccccatgcaatcattcgtcataccattagatctacaaacaggaatgccagagctgaacggacagcttcagaaataaattttgacaaattacaatttgaacctcctctgagaaaagaaacagaagcacgagatgaaatgggattgtcatcagacccaaatttcatgttacagtggaatccttttgttgatggtgcaaatactggcaaatcaacctcaaaacgtgcaataccacctcccctacctcctaagccaaggataagcagttaccctgaagacaactttccggatgaagaaaaagcatcaaccataaaacattgtcctgattcagaaagcagagctccccaaattctcagaagacagagtagcccaagttgtgggcctgtggcagagacttcttctattggaaatggtgatggtatttcaaaactgatgagtgaaaatacagaaggatcagcacaagcaccacagttaccacgaaaaaaggacaaacgagacttccctaaaccagccatcaatggccttccacccaccccaaaagttctgatgggagcatgcttttcaaaagtttttgatggctgtcctttgaaaattaattgtgcaacatcctggatacatcctgatacaaaagatcagtacattatttttggaactgaagatggtatttacacactgaatctcaatgagctacatgaggcaacgatggaacagttatttccacggaagtgtacttggctgtatgttatcaataatactttaatgtcattatcaggaaaaacctttcagctctactctcacaatcttatagctttgtttgaacatgccaaaaaaccaggattagctgcccatattcaaactcacaggtttccagaccgaatactaccaagaaaattcgctttaacaacaaagattcctgatacaaaaggctgccacaaatgttgcatagtcagaaacccttacacgggacataaatacctctgtggagctttacagtctggaattgttttacttcagtggtatgagccaatgcagaaattcatgttgataaagcactttgattttcctttgccaagtcctttgaatgtttttgaaatgctggtgatacctgaacaggaataccctatggtctgtgtagctattagcaaaggcactgaatcgaatcaggtagttcagtttgagacaatcaatttgaactctgcatcttcatggtttacagaaattggtgcaggcagccagcagttagattccattcatgtaacacagttggagagagataccgttttagtgtgtttagacaaatttgtgaaaattgtaaatctacaaggaaaattaaaatcaagtaagaaactggcctctgagttaagttttgattttcgcattgaatctgtagtatgccttcaagacagtgtgttggctttctggaaacatgggatgcagggtaaaagcttcaagtcagatgaggttacccaggagatttcagatgaaacaagagttttccgcttattaggatcagacagggttgtcgttttggaaagtaggccaacagaaaatcctactgcacacagcaatctctacatcttggctggacatgaaaatagttactaagcaacagaaactgatctcaaatgacaggaaaatgaatatactccattgaaaggaaaaataaggaaattcaatacaaactgcactatgatttgctttaactattatgggttatattgcaaatgatctgtactttagggtagaattcaatattttctgcagctggaaacagctagtctatctcttgccactgtgtggtggttatatcaagtttgcttaataaaagctatgagacaaatagtcctctagttccaggaaacacagtctttttttaaaaaaaacaatgtttgtaacaagggtgccatggtatttttagataactcgtgattatcttaagagaggtaaatttagtgatcattttatatcatgtcttattccttcttaatgaacataatttgttaaattctcaagcaaggttttcacttttatattggccattctgtatgtttttgtaaaacagaatatttaatccttatttattaatctcttgctggagtggtgtaatgtatctaacttttagcaaaggagggttgcagagcagcttaaattttttttataatgtataagaattttgtttatcttttaagagtagtaaagtactttgagtgtttgggggttcaacacacacatgcaattttgcttaacaaaagtattttataatacagtttcatacagaattaccttaaaagggagtcttatgttttcaactacagatagttgtaagggatcatacagaagatattgatgatagttgaaatattcttagaaggggtgtgtatgtctagctgtgtctaccatgtgtatgtattcttgacaagcagtataaaatacctgtgatttttctttacattagggataatgcataaggaattaatcttcatatatattatcatccctaatgtagcagggggaagtatttaattgcccatgatatgtattttacttatactatgccagagaggaaactataaagtaattacacatgtaatcttgggtttttcacatatgtaggtattcattttgagtaggttgaagaagaaaaaaaatatttaaatgaattgaattcctgatgggatagtatcaataagtatttaaaagccagtattctaaaaataataaagggtagggtcatttttgagtttgtttttcttttgctattgttaatattcaaaattaaagtgttacattggt

SEQ ID NO: 4096 - protein, 845 aa, Homosapiens; identical to SEQ ID NO: 4088

SEQ ID NO: 4097 - DNA, 3111 bp, Homosapiens
ggcgccgacccatgctggctgggaacgtgtctcccggtgacgcagccccgggtggggaacgtggtgcggcggcggcggcggcggcgactgtacgcgcctccgccgcccccgagaggacgcgccgtgcagcggctgagtggcggcggcggcgacggcaaacccggagctgccggccggcgcgcgggaggaggacgcgggtgcggtctaggaaacggagctgcgggcggaggctccatgttgggaagcggcgccgttcgtgcttgttagcgggaatccgggagccgcggggtgagctggcgggggccgggccctaagtgaagatggaggccccgctgcggcctgccgcggacatcctgaggcggaacccgcagcaggactacgaactcgtccagagggtcggcagcggcacctacggggacgtctataaggccagaaatgtacacacaggagagctggctgcagtaaaaatcattaaattggagcctggagatgatttttctttgattcaacaagaaatatttatggttaaagaatgtaaacattgtaacatcgttgcctactttgggagttatcttagtcgggaaaaactatggatttgtatggaatactgtggtggcggatcacttcaagatatttaccatgttactggaccattatcagaattgcaaatagcctatgtatgcagagaaaccttacagggtcttgcctatttgcatactaaaggcaaaatgcatagagatatcaaaggtgctaatattttattgacagaccatggcgatgtaaaattagctgactttggtgtggctgcaaaaataacagctaccattgcaaaacgaaaatctttcattggcaccccttactggatggccccagaagttgcagcagtagagaagaatggtggctacaaccaactctgtgatatctgggcagtaggaataacagcaattgaacttggagaacttcagccacctatgtttgatctccacccaatgagggctctcttcttaatgtcaaaaagtaattttcagcctccaaaactaaaggacaaaacaaaatggtcatcaacattccataattttgtcaaaatagcactaaccaaaaacccaaaaaaaagaccaactgctgaaagacttctgactcacacttttgttgcacagccaggtctctctagagccctagcagttgaactgttagacaaagtgaacaatccagataaccacgcacattacactgaagcagatgacgatgactttgagccccatgcaatcattcgtcataccattagatctacaaacaggaatgccagagctgaacggacagcttcagaaataaattttgacaaattacaatttgaacctcctctgagaaaagaaacagaagcacgagatgaaatgggattgtcatcagacccaaatttcatgttacagtggaatccttttgttgatggtgcaaatactggcaaatcaacctcaaaacgtgcaataccacctcccctacctcctaagccaaggataagcagttaccctgaagacaactttccggatgaagaaaaagcatcaaccataaaacattgtcctgattcagaaagcagagctccccaaattctcagaagacagagtagcccaagttgtgggcctgtggcagagacttcttctattggaaatggtgatggtatttcaaaactgatgagtgaaaatacagaaggatcagcacaagcaccacagttaccacgaaaaaaggacaaacgagacttccctaaaccagccatcaatggccttccacccaccccaaaagttctgatgggagcatgcttttcaaaagtttttgatggctgtcctttgaaaattaattgtgcaacatcctggatacatcctgatacaaaagatcagtacattatttttggaactgaagatggtatttacacactgaatctcaatgagctacatgaggcaacgatggaacagttatttccacggaagtgtacttggctgtatgttatcaataatactttaatgtcattatcaggaaaaacctttcagctctactctcacaatcttatagctttgtttgaacatgccaaaaaaccaggattagctgcccatattcaaactcacaggtttccagaccgaatactaccaagaaaattcgctttaacaacaaagattcctgatacaaaaggctgccacaaatgttgcatagtcagaaacccttacacgggacataaatacctctgtggagctttacagtctggaattgttttacttcagtggtatgagccaatgcagaaattcatgttgataaagcactttgattttcctttgccaagtcctttgaatgtttttgaaatgctggtgatacctgaacaggaataccctatggtctgtgtagctattagcaaaggcactgaatcgaatcaggtagttcagtttgagacaatcaatttgaactctgcatcttcatggtttacagaaattggtgcaggcagccagcagttagattccattcatgtaacacagttggagagagataccgttttagtgtgtttagacaaatttgtgaaaattgtaaatctacaaggaaaattaaaatcaagtaagaaactggcctctgagttaagttttgattttcgcattgaatctgtagtatgccttcaagacagtgtgttggctttctggaaacatgggatgcagggtaaaagcttcaagtcagatgaggttacccaggagatttcagatgaaacaagagttttccgcttattaggatcagacagggttgtcgttttggaaagtaggccaacagaaaatcctactgcacacagcaatctctacatcttggctggacatgaaaatagttactaagcaacagaaactgatctcaaatgacaggaaaatgaatatactccattgaaaggaaaaataaggaaattcaatacaaactgcactatgatttgctttaactattatgggttatattgcaaatgatctgtactttagggtagaattcaatattttctgcagctggaaacagctagtctatctcttgccactgtgtggtggttatatcaagtttgcttaataaaagctatgagacaaatagtcctctagttccagg

SEQ ID NO: 4098 - protein, 845 aa, Homosapiens; identical to SEQ ID NO: 4088

SEQ ID NO: 4099 - DNA, 407 bp, Homosapiens
ggaaatggtgatggtatttcaaaactgatgagtgaaaatacagaaggatcagcacaagcaccacagttaccacgaaaaaaggacaaacgagacttccctaaaccagccatcaatggccttccacccaccccaaaagttctgatgggagcatgcttttcaaaagtttttgatggctgtcctttgaaaattaattgtgcaacatcctggatacatcctgatacaaaagatcagtacattatttttggaactgaagatggtatttacacactgaatctcaatgagctacatgaggcaacgatggaacagttatttccacggaagtgtacttggctgtatgttatcaataatactttaatgtcattatcaggtatgtatgtgatgatgaaaaataaaccatagataagcag

SEQ ID NO: 4100 - protein, 123 aa, Homosapiens
MSENTEGSAQAPQLPRKKDKRDFPKPAINGLPPTPKVLMGACFSKVFDGCPLKINCATSWIHPDTKDQYIIFGTEDGIYTLNLNELHEATMEQLFPRKCTWLYVINNTLMSLSGMYVMMKNKP

SEQ ID NO: 4101 - DNA, 501 bp, Homosapiens
aggaggttcaaattgtaatttgtcaactgcaaaatatataacagattttcagcaatgggcatgattttgtccataactggaaaataaaaattattcagaaattacaaaccaagggaattccatcgaaaccagaaaagcaacccctattttaaaagtattctgatatgttgaagtatgtagccttagtctgaaattttattattctacaaaacatacaagaacacgcagcacaaccctccaaaaccaccaatggaaaatgtaaaccaaacacatacaatttatttctgaagctgtccgttcagctctggcattcctgtttgtagatctaatggtatgacgaatgattgcatggggctgtgaatataagcataatatatatactttaacaaatttcaatgagaaagttaaaaggtcaaactttcttatcatttattgataaatatgaatatctactagtaaattataggataaacataaaacaaatacaatgaacgctacaat

SEQ ID NO: 4102 - protein, 31 aa, Homosapiens
MIAWGCEYKHNIYTLTNFNEKVKRSNFLIIY

SEQ ID NO: 4103 - DNA, 595 bp, Homosapiens
ctgaagaaaagccttggaggaagtagaccaaattttaaacaggagctgtttttgagtggtgggactattggtaattttttaaacacttttgtgtcttatctatatttttctttaatgggaaaatgagtttgctcagcattttattggaaatattttgttttttagttttgataaaagtatggttgataagcaattaacatagtaccaagtaattttaatgtaattaacaagcttttaattaacaagatttttgtttttattttatttttaggccagaaatgtacacacaggagagctggctgcagtaaaaatcattaaattggagcctggagatgatttttctttgattcaacaagaaatatttatggttaaagaatgtaaacattgtaacatcgttgcctactttgggagttatcttaggtaagagaaaaaaaagcatcatctctctctgtattttatatattctttgctactacactctctcccttgtatgtaagtgctactatatttgtatgtttttaaacactgcaaagttctaaattttttaaggttttcctatttctacggttttcccctattacatattaataatggt

SEQ ID NO: 4104 - protein, 42 aa, Homosapiens
AINIVPSNFNVINKLLINKIFVFILFLGQKCTHRRAGCSKNH

SEQ ID NO: 4105 - DNA, 2913 bp, Homosapiens
tgccgtcgccgccgccgccactcagccgctgcacggcgcgtcctctcgggggcggcggaggcgcgtacagtcgccgccgccgccgccgccgcaccacgttccccacccggggctgcgtcaccgggagacacgttcccagccagcatgggtcggcgcccagcggcccgcccgagcactccggccgcagaaccagagtgccgccctgaggcctgctgagaacacaacaccctcccgaccgcgccaccgcgcccccctagccgggcgcgtccttgcagggcctgggctgtctccctcccactctcagaaataaggcacacgcctgggcattcgtgggccaacgggccttggctaaaccgtccccacatttgtcagcgccacagcaacatcctcagagtctgagcgaactgcgcccagcgcgggcacggagcctcccaccgccagcaacctgcggccccggagaaggcagcgagcgcagtgacagcgcctcaccgccaccagctcctggaccaccatggccaagaaccgcagggacagaaacagttggggtggattttcggaaaagacatatgaatggagctcagaagaggaggagccagtgaaaaaggcaggaccagtccaagtcctcattgtcaaagatgaccattcctttgagttagatgaaactgcattaaatcggatccttctctcggaggctgtcagagacaaggaggttgttgctgtatctgttgctggagcatttagaaaaggaaaatcattcctgatggacttcatgttgagatacatgtacaaccaggaatcagttgattgggttggagactacaatgaaccattgactggtttttcatggagaggtggatctgagcgagagaccacaggaattcagatatggagtgaaatcttccttatcaataaacctgatggtaaaaaggttgcagtgttattgatggatactcagggaacctttgatagtcagtcaactttgagagattcagccacagtatttgcccttagcacaatgatcagctcaatacaggtatataacttatcccaaaatgtccaggaggatgatcttcagcacctccagcttttcactgagtatggcagactggcaatggaggaaacattcctgaagccatttcagagtctgatatttcttgttcgagactggagtttcccatacgaattttcatatggagccgatggtggtgccaaattcttggaaaaacgcctcaaggtctcagggaaccagcatgaagaactacagaacgtcagaaaacacatccattcctgtttcaccaacatttcctgttttctgctacctcatcctggcttaaaagtagctaccaatccaaactttgatggaaaattgaaagaaatagatgatgaattcatcaaaaacttgaaaatactgattccttggctacttagtcccgagagcctagatattaaagagatcaatgggaataaaatcacctgccggggtctggtggagtacttcaaggcttatataaagatctatcaaggtgaagaattaccacatcccaaatccatgttacaggccacagcagaagctaacaatttagcagccgtggcaactgccaaggacacatacaacaaaaaaatggaagagatttgtggtggtgacaaaccatttctggccccaaatgacttgcagaccaaacacctgcaacttaaggaagaatctgtgaagctattccgaggggtgaagaagatgggtggggaagaatttagccggcgttacctgcagcagttggagagtgaaatagatgaactttacatccaatatatcaagcacaatgatagcaaaaatatcttccatgcagctcgtaccccagccacactgtttgtagtcatctttatcacatatgtgattgctggtgtgactggattcattggtttggacatcatagctagcctatgcaatatgataatgggactgacccttatcaccctgtgcacttgggcatatatccggtactctggagaataccgagagctgggagctgtaatagaccaggtggctgcagctctgtgggaccagggaagtacaaatgaggctttgtacaagctttacagtgcagcagcaacccacagacatctgtatcatcaagctttccctacaccaaagtcggaatctactgaacaatcagaaaagaaaaaaatgtaatgcaaattttaagaaatacaggtgcatgaccaattgtcaattaaatattcagttttatgtctccatgcaaacattcaaagtgcttccatcagaacggagtaaaatactaaacacctctgaagactgcaaactggattagttcttttacttcagtgtttaataagcagatgtatgtatgcatggttatactattttgttaacatgtacaatttcctgatttttcttcaaaaatgctgttataaagtatttgtctatttatgataacagtacacgtgttctgcttgaatttactaaattctactactgggttataattaaatcatgtgatattccacgtttggatatgctcatttaatttctacagaaaaaattttaaattatttcacattagccatttgttaaaacacagcatcataactcagcaggctggatttaatctgtatcatcttatatatatcacaatcttatttttaagcacattttagagttccttagttgctttatcaaaaaccagatattgcttttacatggtttaatagaatataaacctcttgataaaaaatgcacaaaaaatcactttgtatatgtgagtttcactgcattgtatattttttcatttggtacacaaagaatgtattcttcataggtttattcttttaatatgtgaactattattaaagtttactctggttcctaagattaaaaacaaatgcttactgaatttg

SEQ ID NO: 4106 - protein, 558 aa, Homosapiens; identical to SEQ ID NO: 576

SEQ ID NO: 4107 - DNA, 1853 bp, Homosapiens
agtatgtgctctgggacaaaacagcatatttggcaacatctcggtgtccttatctgcagcttgaagaggcgccacagcaacatcctcagagtctgagcgaactgcgcccagcgcgggcacggagcctcccaccgccagcaacctgcggccccggagaaggcagcgagcgcagtgacagcgcctcaccgccaccagctcctggaccaccatggccaagaaccgcagggacagaaacagttggggtggattttcggaaaagacatatgaatggagctcagaagaggaggagccagtgaaaaaggcaggaccagtccaagtcctcattgtcaaagatgaccattcctttgagttagatgaaactgcattaaatcggatccttctctcggaggctgtcagagacaaggaggttgttgctgtatctgttgctggagcatttagaaaaggaaaatcattcctgatggacttcatgttgagatacatgtacaaccaggaatcagttgattgggttggagactacaatgaaccattgactggtttttcatggagaggtggatctgagcgagagaccacaggaattcagatatggagtgaaatcttccttatcaataaacctgatggtaaaaaggttgcagtgttattgatggatactcagggaacctttgatagtcagtcaactttgagagattcagccacagtatttgcccttagcacaatgatcagctcaatacaggtatataacttatcccaaaatgtccaggaggatgatcttcagcacctccagcttttcactgagtatggcagactggcaatggaggaaacattcctgaagccatttcagagtctgatatttcttgttcgagactggagtttcccatacgaattttcatatggagccgatggtggtgccaaattcttggaaaaacgcctcaaggtctcagggaaccagcatgaagaactacagaacgtcagaaaacacatccattcctgtttcaccaacatttcctgttttctgctacctcatcctggcttaaaagtagctaccaatccaaactttgatggaaaattgaaagaaatagatgatgaattcatcaaaaacttgaaaatactgattccttggctacttagtcccgagagcctagatattaaagagatcaatgggaataaaatcacctgccggggtctggtggagtacttcaaggcttatataaagatctatcaaggtgaagaattaccacatcccaaatccatgttacaggccacagcagaagctaacaatttagcagccgtggcaactgccaaggacacatacaacaaaaaaatggaagagatttgtggtggtgacaaaccatttctggccccaaatgacttgcagaccaaacacctgcaacttaaggaagaatctgtgaagctattccgaggggtgaagaagatgggtggggaagaatttagccggcgttacctgcagcagttggagagtgaaatagatgaactttacatccaatatatcaagcacaatgatagcaaaaatatcttccatgcagctcgtaccccagccacactgtttgtagtcatctttatcacatatgtgattgctggtgtgactggattcattggtttggacatcatagctagcctatgcaatatgataatgggactgacccttatcaccctgtgcacttgggcatatatccggtactctggagaataccgagagctgggagctgtaatagaccaggtggctgcagctctgtgggaccaggctttgtacaagctttacagtgcagcagcaacccacagacatctgtatcatcaagctttccctacaccaaagtcggaatctactgaacaatcag

SEQ ID NO: 4108 - protein, 547 aa, Homosapiens
MAKNRRDRNSWGGFSEKTYEWSSEEEEPVKKAGPVQVLIVKDDHSFELDETALNRILLSEAVRDKEVVAVSVAGAFRKGKSFLMDFMLRYMYNQESVDWVGDYNEPLTGFSWRGGSERETTGIQIWSEIFLINKPDGKKVAVLLMDTQGTFDSQSTLRDSATVFALSTMISSIQVYNLSQNVQEDDLQHLQLFTEYGRLAMEETFLKPFQSLIFLVRDWSFPYEFSYGADGGAKFLEKRLKVSGNQHEELQNVRKHIHSCFTNISCFLLPHPGLKVATNPNFDGKLKEIDDEFIKNLKILIPWLLSPESLDIKEINGNKITCRGLVEYFKAYIKIYQGEELPHPKSMLQATAEANNLAAVATAKDTYNKKMEEICGGDKPFLAPNDLQTKHLQLKEESVKLFRGVKKMGGEEFSRRYLQQLESEIDELYIQYIKHNDSKNIFHAARTPATLFVVIFITYVIAGVTGFIGLDIIASLCNMIMGLTLITLCTWAYIRYSGEYRELGAVIDQVAAALWDQALYKLYSAAATHRHLYHQAFPTPKSESTEQ

SEQ ID NO: 4109 - DNA, 2610 bp, Homosapiens
agtatgtgctctgggacaaaacagcatatttggcaacatctcggtgtccttatctgcagcttgaagaggcgccacagcaacatcctcagagtctgagcgaactgcgcccagcgcgggcacggagcctcccaccgccagcaacctgcggccccggagaaggcagcgagcgcagtgacagcgcctcaccgccaccagctcctggaccaccatggccaagaaccgcagggacagaaacagttggggtggattttcggaaaagacatatgaatggagctcagaagaggaggagccagtgaaaaaggcaggaccagtccaagtcctcattgtcaaagatgaccattcctttgagttagatgaaactgcattaaatcggatccttctctcggaggctgtcagagacaaggaggttgttgctgtatctgttgctggagcatttagaaaaggaaaatcattcctgatggacttcatgttgagatacatgtacaaccaggaatcagttgattgggttggagactacaatgaaccattgactggtttttcatggagaggtggatctgagcgagagaccacaggaattcagatatggagtgaaatcttccttatcaataaacctgatggtaaaaaggttgcagtgttattgatggatactcagggaacctttgatagtcagtcaactttgagagattcagccacagtatttgcccttagcacaatgatcagctcaatacaggtatataacttatcccaaaatgtccaggaggatgatcttcagcacctccagcttttcactgagtatggcagactggcaatggaggaaacattcctgaagccatttcagagtctgatatttcttgttcgagactggagtttcccatacgaattttcatatggagccgatggtggtgccaaattcttggaaaaacgcctcaaggtctcagggaaccagcatgaagaactacagaacgtcagaaaacacatccattcctgtttcaccaacatttcctgttttctgctacctcatcctggcttaaaagtagctaccaatccaaactttgatggaaaattgaaagaaatagatgatgaattcatcaaaaacttgaaaatactgattccttggctacttagtcccgagagcctagatattaaagagatcaatgggaataaaatcacctgccggggtctggtggagtacttcaaggcttatataaagatctatcaaggtgaagaattaccacatcccaaatccatgttacaggccacagcagaagctaacaatttagcagccgtggcaactgccaaggacacatacaacaaaaaaatggaagagatttgtggtggtgacaaaccatttctggccccaaatgacttgcagaccaaacacctgcaacttaaggaagaatctgtgaagctattccgaggggtgaagaagatgggtggggaagaatttagccggcgttacctgcagcagttggagagtgaaatagatgaactttacatccaatatatcaagcacaatgatagcaaaaatatcttccatgcagctcgtaccccagccacactgtttgtagtcatctttatcacatatgtgattgctggtgtgactggattcattggtttggacatcatagctagcctatgcaatatgataatgggactgacccttatcaccctgtgcacttgggcatatatccggtactctggagaataccgagagctgggagctgtaatagaccaggtggctgcagctctgtgggaccagggaagtacaaatgaggctttgtacaagctttacagtgcagcagcaacccacagacatctgtatcatcaagctttccctacaccaaagtcggaatctactgaacaatcagaaaagaaaaaaatgtaatgcaaattttaagaaatacaggtgcatgaccaattgtcaattaaatattcagttttatgtctccatgcaaacattcaaagtgcttccatcagaacggagtaaaatactaaacacctctgaagactgcaaactggattagttcttttacttcagtgtttaataagcagatgtatgtatgcatggttatactattttgttaacatgtacaatttcctgatttttcttcaaaaatgctgttataaagtatttgtctatttatgataacagtacacgtgttctgcttgaatttactaaattctactactgggttataattaaatcatgtgatattccacgtttggatatgctcatttaatttctacagaaaaaattttaaattatttcacattagccatttgttaaaacacagcatcataactcagcaggctggatttaatctgtatcatcttatatatatcacaatcttatttttaagcacattttagagttccttagttgctttatcaaaaaccagatattgcttttacatggtttaatagaatataaacctcttgataaaaaatgcacaaaaaatcactttgtatatgtgagtttcactgcattgtatattttttcatttggtacacaaagaatgtattcttcataggtttattcttttaatatgtgaactattattaaagtttactctggttcctaagattaaaaacaaatgcttactgaatttg

SEQ ID NO: 4110 - protein, 558 aa, Homosapiens; identical to SEQ ID NO: 576

SEQ ID NO: 4111 - DNA, 2627 bp, Homosapiens
gggagggtgtgacgctggtatctgtgtgaactcgggcttgtgatgctgagcttggttcatctgctttctcctcccttttcctccccactccttcccaccagcgccacagcaacatcctcagagtctgagcgaactgcgcccagcgcgggcacggagcctcccaccgccagcaacctgcggccccggagaaggcagcgagcgcagtgacagcgcctcaccgccaccagctcctggaccaccatggccaagaaccgcagggacagaaacagttggggtggattttcggaaaagacatatgaatggagctcagaagaggaggagccagtgaaaaaggcaggaccagtccaagtcctcattgtcaaagatgaccattcctttgagttagatgaaactgcattaaatcggatccttctctcggaggctgtcagagacaaggaggttgttgctgtatctgttgctggagcatttagaaaaggaaaatcattcctgatggacttcatgttgagatacatgtacaaccaggaatcagttgattgggttggagactacaatgaaccattgactggtttttcatggagaggtggatctgagcgagagaccacaggaattcagatatggagtgaaatcttccttatcaataaacctgatggtaaaaaggttgcagtgttattgatggatactcagggaacctttgatagtcagtcaactttgagagattcagccacagtatttgcccttagcacaatgatcagctcaatacaggtatataacttatcccaaaatgtccaggaggatgatcttcagcacctccagcttttcactgagtatggcagactggcaatggaggaaacattcctgaagccatttcagagtctgatatttcttgttcgagactggagtttcccatacgaattttcatatggagccgatggtggtgccaaattcttggaaaaacgcctcaaggtctcagggaaccagcatgaagaactacagaacgtcagaaaacacatccattcctgtttcaccaacatttcctgttttctgctacctcatcctggcttaaaagtagctaccaatccaaactttgatggaaaattgaaagaaatagatgatgaattcatcaaaaacttgaaaatactgattccttggctacttagtcccgagagcctagatattaaagagatcaatgggaataaaatcacctgccggggtctggtggagtacttcaaggcttatataaagatctatcaaggtgaagaattaccacatcccaaatccatgttacaggccacagcagaagctaacaatttagcagccgtggcaactgccaaggacacatacaacaaaaaaatggaagagatttgtggtggtgacaaaccatttctggccccaaatgacttgcagaccaaacacctgcaacttaaggaagaatctgtgaagctattccgaggggtgaagaagatgggtggggaagaatttagccggcgttacctgcagcagttggagagtgaaatagatgaactttacatccaatatatcaagcacaatgatagcaaaaatatcttccatgcagctcgtaccccagccacactgtttgtagtcatctttatcacatatgtgattgctggtgtgactggattcattggtttggacatcatagctagcctatgcaatatgataatgggactgacccttatcaccctgtgcacttgggcatatatccggtactctggagaataccgagagctgggagctgtaatagaccaggtggctgcagctctgtgggaccaggctttgtacaagctttacagtgcagcagcaacccacagacatctgtatcatcaagctttccctacaccaaagtcggaatctactgaacaatcagaaaagaaaaaaatgtaatgcaaattttaagaaatacaggtgcatgaccaattgtcaattaaatattcagttttatgtctccatgcaaacattcaaagtgcttccatcagaacggagtaaaatactaaacacctctgaagactgcaaactggattagttcttttacttcagtgtttaataagcagatgtatgtatgcatggttatactattttgttaacatgtacaatttcctgatttttcttcaaaaatgctgttataaagtatttgtctatttatgataacagtacacgtgttctgcttgaatttactaaattctactactgggttataattaaatcatgtgatattccacgtttggatatgctcatttaatttctacagaaaaaattttaaattatttcacattagccatttgttaaaacacagcatcataactcagcaggctggatttaatctgtatcatcttatatatatcacaatcttatttttaagcacattttagagttccttagttgctttatcaaaaaccagatattgcttttacatggtttaatagaatataaacctcttgataaaaaatgcacaaaaaatcactttgtatatgtgagtttcactgcattgtatattttttcatttggtacacaaagaatgtattcttcataggtttattcttttaatatgtgaactattattaaagtttactctggttcctaagattaaaaacaaatgcttactgaatttg

SEQ ID NO: 4112 - protein, 553 aa, Homosapiens; identical to SEQ ID NO: 578

SEQ ID NO: 4113 - DNA, 1816 bp, Homosapiens
atttggaacctattatgtagatcacacaaataagaaggcccaatacaggcatccctgtgctcctagatatgaccacattctgaagtgggaactcttccagctggctgacctggatacataccagggaatgctaaagttgctcttcatgaaagaattggagcagattgttaaaatgtatgaagcatacagacaagcccttcttacagagttggaaaaccgaaagcagagacagcagtggtatgcccaacaacatggaaaaaatttttgagctgattttttaaaaatttaagttttgtaagagctttaaaatattttcacagataaaaaattgcaaacaagtactctggttaataaatgctgcttcctttgtggaaattataaaattctaactttacatgtattttgttattagaaattttcttttattgaatgagaaaaattagtctatcattttaagagccaatatggcaaacactttcaaatactgtatattaggaaactgttttggtattcttgatggaaaaaaacgcagcggaaatgtcattatgaacagatgttaaataggaaattattacttgttaacttcttacagcagtagtaccttctttaaaaaaaaaaaagaatctgcggtatttttttaaaaaaaaagtttaccgctgtagtgtgaaatattgtctggaaagggatggtttaaatattaccatgatgtagttgaaatataaaataggatttggaaccttattgtgataaatatttatatatgatgtatgtttgtctcccctctccaaagtaaggaacccagctgggcgtggtggctcactcctgtaatcccagcattttgggaggccgaggtgggtggaccgcttgagtccacgagtttaagaccagcctgggcaacatggtgaagccccatctctacaaaaaatacaaaaaaattagccgggtatgatggtgtgtgcctctagtcccagctacttgggaggctgaggtcagaggatggcttgagcccaagaggcagaggttgcagggtcaagatcgcaccacttgcactgcagcctgagagagagagagccagaccttgtctcaaaaaataaaaaataaaaaaataaaaacaaaataaggaatccttttaaagcatgttgagaaagtattttttggtatgaatgggtgacgggccttttaatctttcaggaatacatataagcaggaatacttagcctgtattgggaaggtgcgtgaaactcaaagttgctaacatcatcttccttattttcagccagtgctgttactgcatttagcatggctctgacgaggcagtggagagttcctgacagcatagcatactgccttctgacagactgggttaagctaccaaaaatgacaaccagggattcaaaaaaaatttttggtcattaaatcgaatgtatattattactttttaattttctaagtatttatcacaggactttaacaccatatatttccctcccagtttttctccccttttggtttaatagttaaaacatttttcataattagtgctgtacatttgattgcaaacaaattggtgatacttctaaactataactataaatctctagaattctgtgaatttcaacattatttgaagtagttcttcagttatatttacatgtgttgtaaatatgtaaatatacttttagcttaggaagtcttccagaatacaaactactcccagttagatatcagtgagtttgaataactgaagaaatgttgacaatgttaagtgtttgattttatataacaagcttattaaatatatttttgtggaaactaa

SEQ ID NO: 4114 - protein, 46 aa, Homosapiens
MLKLLFMKELEQIVKMYEAYRQALLTELENRKQRQQWYAQQHGKNF

SEQ ID NO: 4115 - DNA, 1504 bp, Homosapiens
gcagaatacattttattctagctgagcttttacgcatagtccattaatgcaagttatataaattcatttgattgggaaaatattaatcttcctcaatttaaaatgcccaagtaccatcctaaaccaaaatttaaaattgtgttttcttaagttgactgacattttgattttggggtggtagacataaatgaacaaatttcgaaaacttttgttacttaatgatgaaagggtaattttatcctttgttttattgtagatcttatgccttcattcatccggcatggtccaacaattccaagacgaactgatatctgtcttccagattcaagccctaatgccttttcaacttctggagatgtagtttcaagaaaccagagtttccttagaactccaattcaaagaacacctcatgaaataatgagaagagaaagcaacagattatctgcaccttcttatcttgccagaagtctagcagatgtccctagagagtatggttcttctcagtcatttgtaacggaagttagttttgctgttgaaaatggagactctggttcccgatattattattcagacaatttttttgatggtcagagaaagcggccacttggagatcgtgcacatgaagactacagatattatgaatacaaccatgatctcttccaaagaatgccacagagtcagaggatggcttgagcccaagaggcagaggttgcagggtcaagatcgcaccacttgcactgcagcctgagagagagagagccagaccttgtctcaaaaaataaaaaataaaaaaataaaaacaaaataaggaatccttttaaagcatgttgagaaagtattttttggtatgaatgggtgacgggccttttaatctttcaggaatacatataagcaggaatacttagcctgtattgggaaggtgcgtgaaactcaaagttgctaacatcatcttccttattttcagccagtgctgttactgcatttagcatggctctgacgaggcagtggagagttcctgacagcatagcatactgccttctgacagactgggttaagctaccaaaaatgacaaccagggattcaaaaaaaatttttggtcattaaatcgaatgtatattattactttttaattttctaagtatttatcacaggactttaacaccatatatttccctcccagtttttctccccttttggtttaatagttaaaacatttttcataattagtgctgtacatttgattgcaaacaaattggtgatacttctaaactataactataaatctctagaattctgtgaatttcaacattatttgaagtagttcttcagttatatttacatgtgttgtaaatatgtaaatatacttttagcttaggaagtcttccagaatacaaactactcccagttagatatcagtgagtttgaataactgaagaaatgttgacaatgttaagtgtttgattttatataacaagcttattaaatatatttttgtggaaactaa

SEQ ID NO: 4116 - protein, 143 aa, Homosapiens
MPSFIRHGPTIPRRTDICLPDSSPNAFSTSGDVVSRNQSFLRTPIQRTPHEIMRRESNRLSAPSYLARSLADVPREYGSSQSFVTEVSFAVENGDSGSRYYYSDNFFDGQRKRPLGDRAHEDYRYYEYNHDLFQRMPQSQRMA

SEQ ID NO: 4117 - DNA, 2959 bp, Homosapiens
aaagtttacgggatgtaggcggcggcggcggtagtggtagcggttattcggcggcccgcggcggaccatggccctggccctggcccggcgtcgctgggctttcctcacggcgtccccgagcagcgtcgcagagcgggccgacttccgggaaggaactgaccagcgactgagcggcggccggcgcgcttagcgccctgaacatgcggcagtccctgcgggcgaccccgggctccggacaggcggcggcggaggcggcggctcgggagggaaggaggcggcggcgccggcggaggtggcggcggagacggtgcaggggaagtacgtgaagaaggagacgtcgcctctgcttcggaatcttatgccttcattcatccggcatggtccaacaattccaagacgaactgatatctgtcttccagattcaagccctaatgccttttcaacttctggagatgtagtttcaagaaaccagagtttccttagaactccaattcaaagaacacctcatgaaataatgagaagagaaagcaacagattatctgcaccttcttatcttgccagaagtctagcagatgtccctagagagtatggttcttctcagtcatttgtaacggaagttagttttgctgttgaaaatggagactctggttcccgatattattattcagacaatttttttgatggtcagagaaagcggccacttggagatcgtgcacatgaagactacagatattatgaatacaaccatgatctcttccaaagaatgccacagaatcaggggaggcatgcttcaggtattgggagagttgctgctacatctttaggaaatttgactaaccatggttctgaagatttaccccttcctcctggctggtctgtggactggacaatgagagggagaaaatattatatagatcataacacaaatacaactcactggagccatcctcttgagcgagaaggacttcctcctggatgggaacgagttgagtcatccgaatttggaacctattatgtagatcacacaaataagaaggcccaatacaggcatccctgtgctcctagtgtacctcggtatgatcaaccacctcctgtcacataccagccacagcaaactgaaagaaatcagtcccttctggtacctgcaaatccatatcatactgcagaaattcctgactggcttcaggtttacgcacgagcccctgtgaaatatgaccacattctgaagtgggaactcttccagctggctgacctggatacataccagggaatgctaaagttgctcttcatgaaagaattggagcagattgttaaaatgtatgaagcatacagacaagcccttcttacagagttggaaaaccgaaagcagagacagcagtggtatgcccaacaacatggaaaaaatttttgagctgattttttaaaaatttaagttttgtaagagctttaaaatattttcacagataaaaaattgcaaacaagtactctggttaataaatgctgcttcctttgtggaaattataaaattctaactttacatgtattttgttattagaaattttcttttattgaatgagaaaaattagtctatcattttaagagccaatatggcaaacactttcaaatactgtatattaggaaactgttttggtattcttgatggaaaaaaacgcagcggaaatgtcattatgaacagatgttaaataggaaattattacttgttaacttcttacagcagtagtaccttctttaaaaaaaaaaaagaatctgcggtatttttttaaaaaaaaagtttaccgctgtagtgtgaaatattgtctggaaagggatggtttaaatattaccatgatgtagttgaaatataaaataggatttggaaccttattgtgataaatatttatatatgatgtatgtttgtctcccctctccaaagtaaggaacccagctgggcgtggtggctcactcctgtaatcccagcattttgggaggccgaggtgggtggaccgcttgagtccacgagtttaagaccagcctgggcaacatggtgaagccccatctctacaaaaaatacaaaaaaattagccgggtatgatggtgtgtgcctctagtcccagctacttgggaggctgaggtcagaggatggcttgagcccaagaggcagaggttgcagggtcaagatcgcaccacttgcactgcagcctgagagagagagagccagaccttgtctcaaaaaataaaaaataaaaaaataaaaacaaaataaggaatccttttaaagcatgttgagaaagtattttttggtatgaatgggtgacgggccttttaatctttcaggaatacatataagcaggaatacttagcctgtattgggaaggtgcgtgaaactcaaagttgctaacatcatcttccttattttcagccagtgctgttactgcatttagcatggctctgacgaggcagtggagagttcctgacagcatagcatactgccttctgacagactgggttaagctaccaaaaatgacaaccagggattcaaaaaaaatttttggtcattaaatcgaatgtatattattactttttaattttctaagtatttatcacaggactttaacaccatatatttccctcccagtttttctccccttttggtttaatagttaaaacatttttcataattagtgctgtacatttgattgcaaacaaattggtgatacttctaaactataactataaatctctagaattctgtgaatttcaacattatttgaagtagttcttcagttatatttacatgtgttgtaaatatgtaaatatacttttagcttaggaagtcttccagaatacaaactactcccagttagatatcagtgagtttgaataactgaagaaatgttgacaatgttaagtgtttgattttatataacaagcttattaaatatatttttgtggaaactaa

SEQ ID NO: 4118 - protein, 350 aa, Homosapiens
MPSFIRHGPTIPRRTDICLPDSSPNAFSTSGDVVSRNQSFLRTPIQRTPHEIMRRESNRLSAPSYLARSLADVPREYGSSQSFVTEVSFAVENGDSGSRYYYSDNFFDGQRKRPLGDRAHEDYRYYEYNHDLFQRMPQNQGRHASGIGRVAATSLGNLTNHGSEDLPLPPGWSVDWTMRGRKYYIDHNTNTTHWSHPLEREGLPPGWERVESSEFGTYYVDHTNKKAQYRHPCAPSVPRYDQPPPVTYQPQQTERNQSLLVPANPYHTAEIPDWLQVYARAPVKYDHILKWELFQLADLDTYQGMLKLLFMKELEQIVKMYEAYRQALLTELENRKQRQQWYAQQHGKNF

SEQ ID NO: 4119 - DNA, 2993 bp, Homosapiens
gaaagtttacgggatgtaggcggcggcggcggtagtggtagcggttattcggcggcccgcggcggaccatggccctggccctggcccggcgtcgctgggctttcctcacggcgtccccgagcagcgtcgcagagcgggccgacttccgggaaggaactgaccagcgactgagcggcggccggcgcgcttagcgccctgaacatgcggcagtccctgcgggcgaccccgggctccggacaggcggcggcggaggcggcggctcgggagggaaggaggcggcggcgccggcggaggtggcggcggagacggccggcgcccggcgcggagccctagggaggcagttcagcgcggcctcgggcctcgtcgagaaggatgctgtcccgaaagaaaaccaaaaacgaagtgtccaagccggccgaggtgcaggggaagtacgtgaagaaggagacgtcgcctctgcttcggaatgcgtcgagatgtgcgtcatgtttgcaaacattgcgggtgtctctcgactgtgctgcaagttgtgcgaactctggggcagaattccttagtcctgctgccggatgcagacttgagaagatcttatgccttcattcatccggcatggtccaacaattccaagacgaactgatatctgtcttccagattcaagccctaatgccttttcaaactctggttcccgatattattattcagacaatttttttgatggtcagagaaagcggccacttggagatcgtgcacatgaagactacagatattatgaatacaaccatgatctcttccaaagaatgccacagaatcaggggaggcatgcttcaggtattgggagagttgctgctacatctttaggaaatttgactaaccatggttctgaagatttaccccttcctcctggctggtctgtggactggacaatgagagggagaaaatattatatagatcataacacaaatacaactcactggagccatcctcttgagcgagaaggacttcctcctggatgggaacgagttgagtcatccgaatttggaacctattatgtagatcacacaaataagaaggcccaatacaggcatccctgtgctcctagtgtacctcggtatgatcaaccacctcctgtcacataccagccacagcaaactgaaagaaatcagtcccttctggtacctgcaaatccatatcatactgcagaaattcctgactggcttcaggtttacgcacgagcccctgtgaaatatgaccacattctgaagtgggaactcttccagctggctgacctggatacataccagggaatgctaaagttgctcttcatgaaagaattggagcagattgttaaaatgtatgaagcatacagacaagcccttcttacagagttggaaaaccgaaagcagagacagcagtggtatgcccaacaacatggaaaaaatttttgagctgattttttaaaaatttaagttttgtaagagctttaaaatattttcacagataaaaaattgcaaacaagtactctggttaataaatgctgcttcctttgtggaaattataaaattctaactttacatgtattttgttattagaaattttcttttattgaatgagaaaaattagtctatcattttaagagccaatatggcaaacactttcaaatactgtatattaggaaactgttttggtattcttgatggaaaaaaacgcagcggaaatgtcattatgaacagatgttaaataggaaattattacttgttaacttcttacagcagtagtaccttctttaaaaaaaaaaaagaatctgcggtatttttttaaaaaaaaagtttaccgctgtagtgtgaaatattgtctggaaagggatggtttaaatattaccatgatgtagttgaaatataaaataggatttggaaccttattgtgataaatatttatatatgatgtatgtttgtctcccctctccaaagtaaggaacccagctgggcgtggtggctcactcctgtaatcccagcattttgggaggccgaggtgggtggaccgcttgagtccacgagtttaagaccagcctgggcaacatggtgaagccccatctctacaaaaaatacaaaaaaattagccgggtatgatggtgtgtgcctctagtcccagctacttgggaggctgaggtcagaggatggcttgagcccaagaggcagaggttgcagggtcaagatcgcaccacttgcactgcagcctgagagagagagagccagaccttgtctcaaaaaataaaaaataaaaaaataaaaacaaaataaggaatccttttaaagcatgttgagaaagtattttttggtatgaatgggtgacgggccttttaatctttcaggaatacatataagcaggaatacttagcctgtattgggaaggtgcgtgaaactcaaagttgctaacatcatcttccttattttcagccagtgctgttactgcatttagcatggctctgacgaggcagtggagagttcctgacagcatagcatactgccttctgacagactgggttaagctaccaaaaatgacaaccagggattcaaaaaaaatttttggtcattaaatcgaatgtatattattactttttaattttctaagtatttatcacaggactttaacaccatatatttccctcccagtttttctccccttttggtttaatagttaaaacatttttcataattagtgctgtacatttgattgcaaacaaattggtgatacttctaaactataactataaatctctagaattctgtgaatttcaacattatttgaagtagttcttcagttatatttacatgtgttgtaaatatgtaaatatacttttagcttaggaagtcttccagaatacaaactactcccagttagatatcagtgagtttgaataactgaagaaatgttgacaatgttaagtgtttgattttatataacaagcttattaaatatatttttgtggaaactaa

SEQ ID NO: 4120 - protein, 284 aa, Homosapiens
MPSFIRHGPTIPRRTDICLPDSSPNAFSNSGSRYYYSDNFFDGQRKRPLGDRAHEDYRYYEYNHDLFQRMPQNQGRHASGIGRVAATSLGNLTNHGSEDLPLPPGWSVDWTMRGRKYYIDHNTNTTHWSHPLEREGLPPGWERVESSEFGTYYVDHTNKKAQYRHPCAPSVPRYDQPPPVTYQPQQTERNQSLLVPANPYHTAEIPDWLQVYARAPVKYDHILKWELFQLADLDTYQGMLKLLFMKELEQIVKMYEAYRQALLTELENRKQRQQWYAQQHGKNF

SEQ ID NO: 4121 - DNA, 3586 bp, Homosapiens
atactcagtagaggatcaacttatttctagttaatcagcatgaacgtttccagcagaatagatgctttggtgtagcacttgcctgggagtcatggttagcattccgcattttttagagagctgaattcagcagcctaggaaacattaggaagaacaccttcaaacagggaacaacgtcttggggggaaagagagtcactgcctccgctagggatcccgagggggtacaaaagcaacaacaataaaaactcgtggagagtaggttccacgacatgcgcatgcgacgaactcccgcactcagcggggcaggtttcgtccttcatcttctcagtcggcaggacctgcttctcgctgaggatgagtgaggacagccgcagctcggcggggacggcccggtagcctagagcgccggcacccgagtcccgccgccggagccgcgcctggagccgcggtgggggaggggcagcggcggcccgcgctgcgtcgagcttcccagaattcccagcggccgcggggaaagtttacgggatgtaggcggcggcggcggtagtggtagcggttattcggcggcccgcggcggaccatggccctggccctggcccggcgtcgctgggctttcctcacggcgtccccgagcagcgtcgcagagcgggccgacttccgggaaggaactgaccagcgactgagcggcggccggcgcgcttagcgccctgaacatgcggcagtccctgcgggcgaccccgggctccggacaggcggcggcggaggcggcggctcgggagggaaggaggcggcggcgccggcggaggtggcggcggagacggccggcgcccggcgcggagccctagggaggcagttcagcgcggcctcgggcctcgtcgagaaggatgctgtcccgaaagaaaaccaaaaacgaagtgtccaagccggccgaggtgcaggggaagtacgtgaagaaggagacgtcgcctctgcttcggaatcttatgccttcattcatccggcatggtccaacaattccaagacgaactgatatctgtcttccagattcaagccctaatgccttttcaacttctggagatgtagtttcaagaaaccagagtttccttagaactccaattcaaagaacacctcatgaaataatgagaagagaaagcaacagattatctgcaccttcttatcttgccagaagtctagcagatgtccctagagagtatggttcttctcagtcatttgtaacggaagttagttttgctgttgaaaatggagactctggttcccgatattattattcagacaatttttttgatggtcagagaaagcggccacttggagatcgtgcacatgaagactacagatattatgaatacaaccatgatctcttccaaagaatgccacagaatcaggggaggcatgcttcaggtattgggagagttgctgctacatctttaggaaatttgactaaccatggttctgaagatttaccccttcctcctggctggtctgtggactggacaatgagagggagaaaatattatatagatcataacacaaatacaactcactggagccatcctcttgagcgagaaggacttcctcctggatgggaacgagttgagtcatccgaatttggaacctattatgtagatcacacaaataagaaggcccaatacaggcatccctgtgctcctagtgtacctcggtatgatcaaccacctcctgtcacataccagccacagcaaactgaaagaaatcagtcccttctggtacctgcaaatccatatcatactgcagaaattcctgactggcttcaggtttacgcacgagcccctgtgaaatatgaccacattctgaagtgggaactcttccagctggctgacctggatacataccagggaatgctaaagttgctcttcatgaaagaattggagcagattgttaaaatgtatgaagcatacagacaagcccttcttacagagttggaaaaccgaaagcagagacagcagtggtatgcccaacaacatggaaaaaatttttgagctgattttttaaaaatttaagttttgtaagagctttaaaatattttcacagataaaaaattgcaaacaagtactctggttaataaatgctgcttcctttgtggaaattataaaattctaactttacatgtattttgttattagaaattttcttttattgaatgagaaaaattagtctatcattttaagagccaatatggcaaacactttcaaatactgtatattaggaaactgttttggtattcttgatggaaaaaaacgcagcggaaatgtcattatgaacagatgttaaataggaaattattacttgttaacttcttacagcagtagtaccttctttaaaaaaaaaaaagaatctgcggtatttttttaaaaaaaaagtttaccgctgtagtgtgaaatattgtctggaaagggatggtttaaatattaccatgatgtagttgaaatataaaataggatttggaaccttattgtgataaatatttatatatgatgtatgtttgtctcccctctccaaagtaaggaacccagctgggcgtggtggctcactcctgtaatcccagcattttgggaggccgaggtgggtggaccgcttgagtccacgagtttaagaccagcctgggcaacatggtgaagccccatctctacaaaaaatacaaaaaaattagccgggtatgatggtgtgtgcctctagtcccagctacttgggaggctgaggtcagaggatggcttgagcccaagaggcagaggttgcagggtcaagatcgcaccacttgcactgcagcctgagagagagagagccagaccttgtctcaaaaaataaaaaataaaaaaataaaaacaaaataaggaatccttttaaagcatgttgagaaagtattttttggtatgaatgggtgacgggccttttaatctttcaggaatacatataagcaggaatacttagcctgtattgggaaggtgcgtgaaactcaaagttgctaacatcatcttccttattttcagccagtgctgttactgcatttagcatggctctgacgaggcagtggagagttcctgacagcatagcatactgccttctgacagactgggttaagctaccaaaaatgacaaccagggattcaaaaaaaatttttggtcattaaatcgaatgtatattattactttttaattttctaagtatttatcacaggactttaacaccatatatttccctcccagtttttctccccttttggtttaatagttaaaacatttttcataattagtgctgtacatttgattgcaaacaaattggtgatacttctaaactataactataaatctctagaattctgtgaatttcaacattatttgaagtagttcttcagttatatttacatgtgttgtaaatatgtaaatatacttttagcttaggaagtcttccagaatacaaactactcccagttagatatcagtgagtttgaataactgaagaaatgttgacaatgttaagtgtttgattttatataacaagcttattaaatatatttttgtggaaactaa

SEQ ID NO: 4122 - protein, 383 aa, Homosapiens; identical to SEQ ID NO: 580

SEQ ID NO: 4123 - DNA, 2680 bp, Homosapiens
tacaacaaatagagaatcttcgaaaggaattgaatgatgtcctaacaaagcgtgcccttcaggaggaggagcttcactccaaggaggagaaattacgtgatattaagtctcatcaagctgaccttgaattggaagttaagaattccctggataccatccatagactggagagcgaattgaaaaagcagagtaagatccaaagccagatgaaagttgagaaagctcacttggaggaagaaattgcagagctcaagaagagccaggcccaggacaaagctaaacttcttgagatgcaagagtccatcaaggacctgagtgccatccgagcagatcttgctaataaattggctgaggaagagagagccaagaaagcagtgcttaaggacctttctgacctcactgcacaggcaaaatccagggatgaagaaacagctacaatcatcacacagttaaagctggaacgagatgtgcaccagagggagctgaaagatctcacatcatcattgcagagtgtgaaaacaaaacacgaacagaatatccaggagcttatgaagcactttaagaaagaaaagagtgaggctgagaatcatatcaggactctgaaggctgaaagtttagaagagaagaatatggctaaaattcatcgtggtcagctggagaagttgaaatcacagtgtgacagactgacagaggaattaacccagaatgaaaatgagaacaaaaaactgaagctaaaatatcaatgtttgaaggatcaactagaagaaagggaaaaacatataagcattgaagaggagcacttaaggaggatggaagaggccagattgcagctcaaggatcaacttctttgcttggagactgaacaggaatccattcttggtgtgataggaaaggaaattgatgcagcttgtaaaacattctccaaggactcagtggagaaattaaaagttttttcatctggtcctgatatacattatgacccacatcgctggttagcagaaagcaagactaaacttcagtggctctgtgaggaactgaaagagagagaaaacagagagaaaaatctgcgacaccagctgatgctctgcagacaacaactcaggaatttgactgaaaacaaggaatctgagttgcagtgtctctttcaacagatagaaaggcaggagcagcttctggatgaaatacatcgtgagaagagagatctactggaagagacccaaagaaaagatgaagaaatgggatctctgcaggaccgtgtaattgcattagaaacgagtacccaagtggccttggaccatctggagtctgtgcctgagaaactgagcctactagaagatttcaaagacttcagagattcctgcagttcatctgagagaactgatggaagatattccaaatacagggttcgcagaaattctcttcagcatcaccaagatgacaccaagtacagaaccaaaagtttcaaaggtgacagaacctttctggaaggttcccacactcgtgggttagatcactcatcctcttggcaggatcacagtcgcttcctgtctagtccaagattttcatacgtgaactcatttaccaaaagaactgttgctccagattcagcttcaaacaaggaagatgccacaatgaatggaacaagttcacaacccaaaaaagaggaatatgggagctaaaaaagcaaatgtaatttgttattttacatgagtatgttacaaataataacatctctattcttacagcaatttggcccagattatctaacagacatacctgcagctttggctctttggtattgccaaacattgacaaaagtgacaatactgttggtccttgtgaatggtaaaccaatccaaataatatcagatcatgaatgatgtgcagctaatttatttgcaacttatactagcacagaaagaatgatattttttcactttgtattttcctttttcaagtgtggtcagtcacattttcccaaccaaaatttggatttctaattgaggccttttaaaaattactggctaaaaagaaggaaaatgagtttcccttgaggcaaaagttgccagcactttagattcagggagcatttatatacaactgattttttgaaaaattttctccctaataaattatcatgtgttataacatgtggagatgtgcatatataacattagacagtccactttataaatgctcaggacttttatatctatcatcttaacagtccacaactgcataccgtagctgaaaattatttccaatcatccatttttaatagcaataaagaattcataaatgatatctgaactgtagagcactgtaaagaattcatagcacaatttatttatttgtctttttgtggccaaatatcctactgtgatcacttcagtcatatcctggaccgtctttggtttactgtgactaaaatcatagcaccaaactcctttgtccatgagatttatatataatcttgtataatttggtcctatctgcttctaccatcccaacttttttcatcaaagtgtctaagaacgtattccctttacacgctgatctcctagtggagaaggatttatattaaatgctaagtaatagtaaactttcaggaactgaatcctattgggtcatggattctgcatagacaagggcaataaagcaatacctttgtaatatgcat

SEQ ID NO: 4124 - protein, 490 aa, Homosapiens
MKVEKAHLEEEIAELKKSQAQDKAKLLEMQESIKDLSAIRADLANKLAEEERAKKAVLKDLSDLTAQAKSRDEETATIITQLKLERDVHQRELKDLTSSLQSVKTKHEQNIQELMKHFKKEKSEAENHIRTLKAESLEEKNMAKIHRGQLEKLKSQCDRLTEELTQNENENKKLKLKYQCLKDQLEEREKHISIEEEHLRRMEEARLQLKDQLLCLETEQESILGVIGKEIDAACKTFSKDSVEKLKVFSSGPDIHYDPHRWLAESKTKLQWLCEELKERENREKNLRHQLMLCRQQLRNLTENKESELQCLFQQIERQEQLLDEIHREKRDLLEETQRKDEEMGSLQDRVIALETSTQVALDHLESVPEKLSLLEDFKDFRDSCSSSERTDGRYSKYRVRRNSLQHHQDDTKYRTKSFKGDRTFLEGSHTRGLDHSSSWQDHSRFLSSPRFSYVNSFTKRTVAPDSASNKEDATMNGTSSQPKKEEYGS

SEQ ID NO: 4125 - DNA, 1612 bp, Homosapiens
agtcgctgcgtttggtcagttgcaccttctgggtcactggtagccgcgggagccgggtggggcctaggcgatgatccggcattaaggagctgggatcatcctccgtctcaggtggtttggggaaagtgtaggggcaaccaaagatcatcggcttgactaggccctttgccctgaacctcatgaagaaatgataggaggcagacatatgtgcctaaaaagagcgttgagctcagagaagagcaactcggagttttgggggtgtgctttgatttgtgtacatcaatggcagaatcatccagcgaatcagatcacttccgctgtcgtgaccgattgagtccatgggctgccagatcaacgcacaggggaactcgaagtcttcctacagtagaagttaccgagaaggtcaacactataacaagtactttacaggataccagtcggaacctgcgacaagtggaccagatgcttggacgataccgagaatacagtaatggacaggcgggtgcgatagaacatttaaaagaaagcttggaacaatcaatcgaccaactccggagtcaacgtttattgagaaactcaggagggagaagtatttctgttacaagtttgagtgcaagtgaccttgatggtggcactgggtcagagctccatcattttccacctacctcacctctcaaggactatggggatccacagggtattaaacgaatgagatcaagaactggtgtccggtttgttcaagagactgatgatatgactcagcttcatggttttcatcagtctcttcgagacctcagcagtgaacaaattcgccttggagatgatttcaacagggagctttccagaaggagccggtcagatgccgaaacaaaaagggctttggaagaattgactgaaaaacttaatgaagcccagaaacaagaagtggtttcagatcgggtggagcggcggcttcaggaactggagagagagatgcgcacagaaagggagctggtggaaagacgccaggatcaactgggactcatgtccctgcagctacaggaggcactaaagaaacaagaagctaaagcagatgagcatgagggggcaataaaaaataagctaagacaaactgaaactgagaagaatcaacttgaacaggaattggagctatctcgaaggttattgaatcaatcagaaggcagccgagaaacacttttgcatcaggtagaagaactgcgtacacaacttacgaaagcagaaggtgatcgaaagggtttacagcatcaagtatctcagatttccaagcaacagtcaaactatcaggatgaacaaggggaggactggagatttaggagaggggttgagcgggaaaaacaggacctggagaagcaaatgtcagatttgagagtgcagctgaacttcagcgcaatggcatctgagttagaggaagtgaaacggtgcatggagagaaaagacaaggagaaagcacatttggcatcacaagtagagcacatcaatagaaaatgtcttttaaatttggttcaagatttggattgtaaagataatgaaatattgacatactctttacaaagccctctacatgtttaataaagacttacttgaaattgtc

SEQ ID NO: 4126 - protein, 435 aa, Homosapiens
MAESSSESDHFRCRDRLSPWAARSTHRGTRSLPTVEVTEKVNTITSTLQDTSRNLRQVDQMLGRYREYSNGQAGAIEHLKESLEQSIDQLRSQRLLRNSGGRSISVTSLSASDLDGGTGSELHHFPPTSPLKDYGDPQGIKRMRSRTGVRFVQETDDMTQLHGFHQSLRDLSSEQIRLGDDFNRELSRRSRSDAETKRALEELTEKLNEAQKQEVVSDRVERRLQELEREMRTERELVERRQDQLGLMSLQLQEALKKQEAKADEHEGAIKNKLRQTETEKNQLEQELELSRRLLNQSEGSRETLLHQVEELRTQLTKAEGDRKGLQHQVSQISKQQSNYQDEQGEDWRFRRGVEREKQDLEKQMSDLRVQLNFSAMASELEEVKRCMERKDKEKAHLASQVEHINRKCLLNLVQDLDCKDNEILTYSLQSPLHV

SEQ ID NO: 4127 - DNA, 440 bp, Homosapiens
cccctgggacgaggggaagtgggactaaaacgtctacagccccacccggctcccgcggctaccagtgacccagaaggtgcaactgaccaaacgcagcgactcaaccgactgtgctctccccagactcgcagctatggcaacttgaactagccgcccagccacagcaagagtacaggaccccgctgccgccgcttggccgtctgggagttgtagtccatctcggcctcatgatcaaggaattaccaagggagagagtcccgaaaaggaactgcaaatcccaggatgccatatagctggccttcgggtaactttcccggataaaagcctgatcccttggccgcgccctcttgccctgctctattttttttttttgttaaaggaccagcctcctttgtaggaggcaaactccagttagaaagtgaataaaaatgcttccttgg

SEQ ID NO: 4128 - protein, 49 aa, Homosapiens
PLGRGEVGLKRLQPHPAPAATSDPEGATDQTQRLNRLCSPQTRSYGNLN

SEQ ID NO: 4129 - DNA, 406 bp, Homosapiens
gaatggttgtcaaatcctttctacctccttattcagagaaggaaggatcttctcatgcacagaggcaacaaatggcaactttctgagtcctcatctataaaatgagcataataacatcacctacttaattggatttggtgaggattcactgggtgagttcatgcaaagcgctgagaacaggaccccccgcccccgttagcattgtcagctgcttcttgaacacaggtgaagatggtcacctctctatggcggcctcagctcttacccgtacatcaagactattctagcaaccaattgggagcttgagtgcccattttaaattctcaaaggataaagagcctgattggcccaaattgtctcaggtgtctctctactccttgtctaatcagccatggtgagacaggta

SEQ ID NO: 4130 - protein, 32 aa, Homosapiens
NGCQILSTSLFREGRIFSCTEATNGNFLSPHL

SEQ ID NO: 4131 - DNA, 2991 bp, Homosapiens
ccgcggacagtccactccgcggggactttctctggataaggacctcctccacagtggtgaggtcacagccccttggagccctccctcttcccacccctcccgctcccgggtctcctttggcctggggtaacccgaggtgcagagctgagaatgaggcgatttcggaggatggagaaatagccccgagtcccgtggaaaatgaggccggcggacttgctgcagctggtgctgctgctcgacctgcccagggacctgggcggaatggggtgttcgtctccaccctgcgagtgccatcaggaggaggacttcagagtcacctgcaaggatattcaacgcatccccagcttaccgcccagtacgcagactctgaagcttattgagactcacctgagaactattccaagtcatgcattttctaatctgcccaatatttccagaatctacgtatctatagatgtgactctgcagcagctggaatcacactccttctacaatttgagtaaagtgactcacatagaaattcggaataccaggaacttaacttacatagaccctgatgccctcaaagagctccccctcctaaagttccttggcattttcaacactggacttaaaatgttccctgacctgaccaaagtttattccactgatatattctttatacttgaaattacagacaacccttacatgacgtcaatccctgtgaatgcttttcagggactatgcaatgaaaccttgacactgaagctgtacaacaatggctttacttcagtccaaggatatgctttcaatgggacaaagctggatgctgtttacctaaacaagaataaatacctgacagttattgacaaagatgcatttggaggagtatacagtggaccaagcttgctggacgtgtctcaaaccagtgtcactgcccttccatccaaaggcctggagcacctgaaggaactgatagcaagaaacacctggactcttaagaaacttccactttccttgagtttccttcacctcacacgggctgacctttcttacccaagccactgctgtgcttttaagaatcagaagaaaatcagaggaatccttgagtccttgatgtgtaatgagagcagtatgcagagcttgcgccagagaaaatctgtgaatgccttgaatagccccctccaccaggaatatgaagagaatctgggtgacagcattgttgggtacaaggaaaagtccaagttccaggatactcataacaacgctcattattacgtcttctttgaagaacaagaggatgagatcattggttttggccaggagctcaaaaacccccaggaagagactctacaagcttttgacagccattatgactacaccatatgtggggacagtgaagacatggtgtgtacccccaagtccgatgagttcaacccgtgtgaagacataatgggctacaagttcctgagaattgtggtgtggttcgttagtctgctggctctcctgggcaatgtctttgtcctgcttattctcctcaccagccactacaaactgaacgtcccccgctttctcatgtgcaacctggcctttgcggatttctgcatggggatgtacctgctcctcatcgcctctgtagacctctacactcactctgagtactacaaccatgccatcgactggcagacaggccctgggtgcaacacggctggtttcttcactgtctttgcaagcgagttatcggtgtatacgctgacggtcatcaccctggagcgctggtatgccatcaccttcgccatgcgcctggaccggaagatccgcctcaggcacgcatgtgccatcatggttgggggctgggtttgctgcttccttctcgccctgcttcctttggtgggaataagtagctatgccaaagtcagtatctgcctgcccatggacaccgagacccctcttgctctggcatatattgtttttgttctgacgctcaacatagttgccttcgtcatcgtctgctgctgttatgtgaagatctacatcacagtccgaaatccgcagtacaacccaggggacaaagataccaaaattgccaagaggatggctgtgttgatcttcaccgacttcatatgcatggccccaatctcattctatgctctgtcagcaattctgaacaagcctctcatcactgttagcaactccaaaatcttgctggtactcttctatccacttaactcctgtgccaatccattcctctatgctattttcaccaaggccttccagagggatgtgttcatcctactcagcaagtttggcatctgtaaacgccaggctcaggcataccgggggcagagggttcctccaaagaacagcactgatattcaggttcaaaaggttacccacgagatgaggcagggtctccacaacatggaagatgtctatgaactgattgaaaactcccatctaaccccaaagaagcaaggccaaatctcagaagagtatatgcaaacggttttgtaagttaacactacactactcacaatggtaggggaacttacaaaataatagtttcttgaatatgcattccaatcccatgacacccccaacacatagctgccctcactcttgtgcaggcgatgtttcaatgtttcatggggcaagagtttatctctggagagtgattagtattaacctaatcattgcccccaagaaggaagttaggctaccagcatatttgaatgccaggtgaaatcaaaataatctacactatctagaagactttcttgatgccaagtccagagatgtcattgtgtaggatgttcagtaaatattaactgagctatgtcaatatagagcttctcagttttgtataacatttcatactaaagattcagcaaatggaaaatgctattaatttggttggtgaccacaagataaaatcagtcccacgttggctcagttcaactagatgttccctgatacaaagagaacttgatttccttaaaactgaaaagccaa

SEQ ID NO: 4132 - protein, 764 aa, Homosapiens; identical to SEQ ID NO: 582

SEQ ID NO: 4133 - DNA, 1273 bp, Homosapiens
gtccagccaaggaaagtgaagcaagcagacttgtttgggtcaaggttgcctagggaagcggagcacttaagtgcctctttttccccttctccagcctcctccacagtggtgaggtcacagccccttggagccctccctcttcccacccctcccgctcccgggtctcctttggcctggggtaacccgaggtgcagagctgagaatgaggcgatttcggaggatggagaaatagccccgagtcccgtggaaaatgaggccggcggacttgctgcagctggtgctgctgctcgacctgcccagggacctgggcggaatggggtgttcgtctccaccctgcgagtgccatcaggaggaggacttcagagtcacctgcaaggatattcaacgcatccccagcttaccgcccagtacgcagactctgaagcttattgagactcacctgagaactattccaagtcatgcattttctaatctgcccaatatttccagaatctacgtatctatagatgtgactctgcagcagctggaatcacactccttctacaatttgagtaaagtgactcacatagaaattcggaataccaggaacttaacttacatagaccctgatgccctcaaagagctccccctcctaaagttccttggcattttcaacactggacttaaaatgttccctgacctgaccaaagtttattccactgatatattctttatacttgaaattacagacaacccttacatgacgtcaatccctgtgaatgcttttcagggactatgcaatgaaaccttgacactgaagctgtacaacaatggctttacttcagtccaaggatatgctttcaatgggacaaagctggatgctgtttacctaaacaagaataaatacctgacagttattgacaaagatgcatttggaggagtatacagtggaccaagcttgctgctacctcttggaagaaagtccttgtcctttgagactcagaaggccccacgctccagtatgccatcatgatgcctgctaaggcagccaccttggtgtacatgctcacagaggctctgttcatggagcagctgctgtttgaaaaattttgaaatgcaagatccacaactagatggaaggcactctagtctttgcagaaaaaaatgtacctgaatgtacattgcacaatgcctggcacaaagaaggaagaatataaatgatagttcgactcgtctgtggaagaacttacaatcatggggaaagatggaataaaaacattttttaaacagcatg

SEQ ID NO: 4134 - protein, 253 aa, Homosapiens; identical to SEQ ID NO: 584

SEQ ID NO: 4135 - DNA, 601 bp, Homosapiens
aggtctcagctgggcactcctgagctctgtgctgcaaccttggggcattgggctctgtctttcggcccctcggggtcagacccctgctgtgttgggggatccgaagtgctcccaagctgcctggaaagcattcaggcggggtcgctagcaagaactcaggctgggcagcggaggcggcacagtgcacacactcctgcaggaacaaccagacaggggctttgggaggggctgcgtgcagggggtcccgcagaacatatgcgccccagtcccgcaggaaggaccgccctgctctctcttggctcactggtggggacagcacttcctggaataacgttgctttggatttaacaacagttgggcaaaggaggtcggtatacagatacaggacaagaagagtggtgtcaaagggaggctaaatcattggttctggcttcatctaaggaattcttatgagaaatcgagggagagactgtcctgggaagtctgatgaaacatgcatgagtcttcgttgaaaccgtgggaggaagaagagttttaccaatcaccagtgctgaagaaatctctcctttctgggcaggatgagggaatcactaaatgacga

SEQ ID NO: 4136 - protein, 34 aa, Homosapiens
MHESSLKPWEEEEFYQSPVLKKSLLSGQDEGITK

SEQ ID NO: 4137 - DNA, 2917 bp, Homosapiens
atcttaatggaagagattatatattttccaaagccattggagatgcagaatggtgaagagttgctttttttcttttataaataaaagaaacttaaaaaaaatgtaaagcggacagtttgaaacttggggcatatgccaaccaaaacttcgtttctgcatgtcagaaaagtgcagtagaagcaaagctatgaaacttggattactgtatgatattcagcttgtcttgggccctctatgtagacaaacattcatattcatagtagtgttgtatactggcctgtttttataactttatttttcaaatattaacaaccactgctttcagagtggttattttgttatttttgaagcaggaaataaccatttgtatttgcacctgcgtattgcatatgaattatggtatacttggcaaatgcttttcttttacctgtgaaaattctgaaagctggtccaagctacattgcataccaaattgtgctcttatatattatttgcatcgtgtcctttttaatcaaatagcatgttttagttttattatagtagcttttgctgtaagaatgtcacttgcttatcttttattgtacttgaattcttaatcatgcttttaacattgtatttaacaaatcatttcgtattaggttccattaaaatgtcattcctttgaaaaggcaagggatttccactttcagaatttgaaaatgaaagtagcatgtttatctaaaggcagaaaatagttcggacttggtattatgaaaataagtaatggtttctggagaggatttgtttagatttgcacagatggcgatggcaccttttacttaaattaacattaatcaacagtgctaaggaaaatttacacaaaattacaagataaaacatggaaatgtgtgcctttcagtatacaaactcttgcttggtggccatttgggtaatcagaccatttgaatgcctgagagcatgtttaatttctgtggagtgccacatatggctaaaacaactctttaatgtgcaattaatttctagagtaaaatgtctgttatgtgagggggatctttatgttgggcttttctattttttaaatgttcacatttctttctgttaattaaaatgccatcataatgtcacatttacactgttgcctcttttaaaagcaaagccactttcttgttctaagattacatcaagacttgagcagtgtgtagtaattaaaatgtgtgcttaatgagcataatagattctggttttaggaaataacatatagcttttatatgaatattttcttttgctataatgaaagtcacagattttttttttcctggcttttatggaggaatgaaaagagttgtctccctctaagagtatactatttttgattctcatagcaataatgtcaccattcttatcagagggtaaataccccttgtataggaaaacagacataatttcctcttgggagttctctttatgacttagcattttcttctacttgagaaaattcctgtttttccgattatttcatcttgaactttcttttttttaagcttttgtgcaatgtaatagtttgttgatccatctttgtacattttcattttatttcatgtctttctctcacctacctgtcagaatcagctatagcagattttgaattctttagttaaaaaatagttgctttacttgtttcctcatgagtttgttaaatagctttgcattttagtcctctattatgctatgaaaattattacgaagtttatattgttccctttttaagcctgccttactcttgtcttttgtcattgtctatggtttaatgaagaacacaccaaactaacatttttgtttattttgaggaacaaaaaaacttttctcttttaagggaagttactacacattgagttagtaactactctttcagtcaaggttccttaatcagtccagtctacatcaggactatgacttggggggcggggctaatcctttttgctgttctgagctactattgtcaactgctgttgtacatactgttatgtgtaatggcgtaaatatatttattatgtttgtaaaattcattgcagatcaaggttgctcttctgtgatatatgggatattatgttttaaagaccatcttggaatacaattagagaacttagtattttgatgtactaagacctattttaagtttaatattctactttgcaaaaactttaattaaagatgttatttaaaaaaaaatgttgcttgctttgcttactagtatatggcattgttatagataattgaataaaatacaatttagaaaggaaaatgctttacattgttaatgagaattccatttaacaacaacaaaaagatgctaaattctgtaccttaaagataagtagattgagatgtcaatttgaattagtaaactgtgttacaaatgattaatactagcttttaaaaagttgtattttccaggcacacaggaatttaggttgggcgaattcacactaacaaattataactaaaaattggtataattaacattgtttttcaaaataaagattactccttgtgaaatattaataattaacatattgtattaaataagtatttctactccaaagtatagattacttaggataaaaacattgttatttctctgtttagtcaaaccacttcctcttagttcagaggttataaataattgcatattaggagaattggattactgaggtttgtattgcgtattgaatatattttgtgttattttagaagataataattagcaggtattttaattttatagttaattcagctgaatcattaagaagctcgcctttttgtatttttttatcctgttaacagactatctagaaaacatgcaaattttaactattaacataatcataataaagatatcttatttattgccagcaaa

SEQ ID NO: 4138 - protein, 43 aa, Homosapiens
MSEKCSRSKAMKLGLLYDIQLVLGPLCRQTFIFIVVLYTGLFL

SEQ ID NO: 4139 - DNA, 2220 bp, Homosapiens
atcttaatggaagagattatatattttccaaagccattggagatgcagaatggtgaagagttgctttttttcttttataaataaaagaaacttaaaaaaaatgtaaagcggacagtttgaaacttggggcatatgccaaccaaaacttcgtttctgcatgtcagaaaagtgcagtagaagcaaagctatgaaacttggattactgtatgatattcagcttgtcttgggccctctatgtagacaaacattcatattcatagtagtgttgtatactggcctgtttttataactttatttttcaaatattaacaaccactgctttcagagtggttattttgttatttttgaagcaggaaataaccatttgtatttgcacctgcgtattgcatatgaattatggtatacttggcaaatgcttttcttttacctgtgaaaattctgaaagctggtccaagctacattgcataccaaattgtgctcttatatattatttgcatcgtgtcctttttaatcaaatagcatgttttagttttattatagtagcttttgctgtaagaatgtcacttgcttatcttttattgtacttgaattcttaatcatgcttttaacattgtatttaacaaatcatttcgtattaggttccattaaaatgtcattcctttgaaaaggcaagggatttccactttcagaatttgaaaatgaaagtagcatgtttatctaaaggcagaaaatagttcggacttggtattatgaaaataagtaatggtttctggagaggatttgtttagatttgcacagatggcgatggcaccttttacttaaattaacattaatcaacagtgctaaggaaaatttacacaaaattacaagataaaacatggaaatgtgtgcctttcagtatacaaactcttgcttggtggccatttgggtaatcagaccatttgaatgcctgagagcatgtttaatttctgtggagtgccacatatggctaaaacaactctttaatgtgcaattaatttctagagtaaaatgtctgttatgtgagggggatctttatgttgggcttttctattttttaaatgttcacatttctttctgttaattaaaatgccatcataatgtcacatttacactgttgcctcttttaaaagcaaagccactttcttgttctaagattacatcaagacttgagcagtgtgtagtaattaaaatgtgtgcttaatgagcataatagattctggttttaggaaataacatatagcttttatatgaatattttcttttgctataatgaaagtcacagattttttttttcctggcttttatggaggaatgaaaagagttgtctccctctaagagtatactatttttgattctcatagcaataatgtcaccattcttatcagagggtaaataccccttgtataggaaaacagacataatttcctcttgggagttctctttatgacttagcattttcttctacttgagaaaattcctgtttttccgattatttcatcttgaactttcttttttttaagcttttgtgcaatgtaatagtttgttgatccatctttgtacattttcattttatttcatgtctttctctcacctacctgtcagaatcagctatagcagattttgaattctttagttaaaaaatagttgctttacttgtttcctcatgagtttgttaaatagctttgcattttagtcctctattatgctatgaaaattattacgaagtttatattgttccctttttaagcctgccttactcttgtcttttgtcattgtctatggtttaatgaagaacacaccaaactaacatttttgtttattttgaggaacaaaaaaacttttctcttttaagggaagttactacacattgagttagtaactactctttcagtcaaggttccttaatcagtccagtctacatcaggactatgacttggggggcggggctaatcctttttgctgttctgagctactattgtcaactgctgttgtacatactgttatgtgtaatggcgtaaatatatttattatgtttgtaaaattcattgcagatcaaggttgctcttctgtgatatatgggatattatgttttaaagaccatcttggaatacaattagagaacttagtattttgatgtactaagacctattttaagtttaatattctactttgcaaaaactttaattaaagatgttattt

SEQ ID NO: 4140 - protein, 43 aa, Homosapiens; identical to SEQ ID NO: 4138

SEQ ID NO: 4141 - DNA, 1780 bp, Homosapiens
cggcggcggcggcggcggtggtggctcgcgcagcttgttggctcgctatataaaggagagaagcgggcggaccggacggctggagctgcagccggtggcggcagcggcggcgcagggagcggtgaccggtggtggtttccctccttggcgcggggtggggagcgggcaacgccccccggacccctgaagggtcgtggctttttttttttttttaaggcgattctcgaggttttcagctgcgggaggagtgcccccctcctcctcctctctccgctctcccctactccttcaggattgattttgtttaaaattttttccccaatcttgcggtgatttgggtcaccctccgggtgttatagtttttttttttttggttttgtttttatcttgttttcttggggttgccccctcttgtttgtgttgtgtgtggaaatggcgaactcggcaaatacaaacaccgtgcctaaattatacagatctgtgattgaagatgtcattaatgatgtgagagacatctttctggatgatggagtggatgaacaagtactgatggaactaaaaactttatgggaaaacaaactaatgcagtccagggcagtagatggatttcattcagaagagcagcagcttctactgcaagttcaacagcagcatcaaccccagcagcagcagcatcaccaccatcaccatcatcagcaagctcagcctcagcagacagtacctcagcaagcgcagacccagcaggttcttattcctgcatcacagcaagccacagcaccacaagttattgttccagattctaagttgatacagcatatgaatgcatcaaacatgagtgctgctgctacagctgctaccttagcactccctgcaggtgtgactcctgttcagcagatattaacaaattcaggccagcttcttcaggtggtcagagcagccaatggtgcccaatatatctttcagcctcagcagtcagtggttctacaacaacaggttataccacaaatgcagcctggtggagtacaagctcctgttatacagcaggtgctggctcctcttcctggagggatttcaccacagacaggtgtcatcatccagcctcagcaaatcttatttacaggaaataagactcaagttatacctacgacagtggcagcacctacaccagcccaagcacagataactgcaactggccagcagcaaccgcaggcccagcctgctcaaacacaagctccattggtcttacaagttgatggaactggggatacatcatctgaagaagatgaagatgaagaagaagactatgatgatgatgaggaggaagacaaagagaaagatggagctgaagatgggcaggtggaagaagagcccctcaatagtgaagatgatgtgagtgatgaggaaggacaggaactctttgacacagaaaatgttgttgtatgccaatatgataagatacacagaagtaaaaacaaatggaaatttcatctcaaggatggcattatgaatcttaatggaagagattatatattttccaaagccattggagatgcagaatggtgaagagttgctttttttcttttataaataaaagaaacttaaaaaaaatgtaaagcggacagtttgaaacttggggcatatgccaaccaaaacttcgtttctgcatgtcagaaaagtgcagtagaagcaaagctactggaacaaagatagaccttgacaacatagacactacttactggcaagccatggaactgtagcacctagggtttttgggtgggag

SEQ ID NO: 4142 - protein, 376 aa, Homosapiens; identical to SEQ ID NO: 586

SEQ ID NO: 4143 - DNA, 1402 bp, Homosapiens
gctttgcaagttcttcaccgcaaagaactgccgcagacttccgcctgggtgccaaccacgtgatcacgcgagcgttggagaggccctaaattatacagatctgtgattgaagatgtcattaatgatgtgagagacatctttctggatgatggagtggatgaacaagtactgatggaactaaaaactttatgggaaaacaaactaatgcagtccagggcagtagatggatttcattcagaagagcagcagcttctactgcaagttcaacagcagcatcaaccccagcagcagcagcatcaccaccatcaccatcatcagcaagctcagcctcagcagacagtacctcagcaagcgcagacccagcaggttcttattcctgcatcacagcaagccacagcaccacaagttattgttccagattctaagttgatacagcatatgaatgcatcaaacatgagtgctgctgctacagctgctaccttagcactccctgcaggtgtgactcctgttcagcagatattaacaaattcaggccagcttcttcaggtggtcagagcagccaatggtgcccaatatatctttcagcctcagcagtcagtggttctacaacaacaggttataccacaaatgcagcctggtggagtacaagctcctgttatacagcaggtgctggctcctcttcctggagggatttcaccacagacaggtgtcatcatccagcctcagcaaatcttatttacaggaaataagactcaagttatacctacgacagtggcagcacctacaccagcccaagcacagataactgcaactggccagcagcaaccgcaggcccagcctgctcaaacacaagctccattggtcttacaagttgatggaactggggatacatcatctgaagaagatgaagatgaagaagaagactatgatgatgatgaggaggaagacaaagagaaagatggagctgaagatgggcaggtggaagaagagcccctcaatagtgaagatgatgtgagtgatgaggaaggacaggaactctttgacacagaaaatgttgttgtatgccaatatgataagatacacagaagtaaaaacaaatggaaatttcatctcaaggatggcattatgaatcttaatggaagagattatatattttccaaagccattggagatgcagaatggtgaagagttgctttttttcttttataaataaaagaaacttaaaaaaaatgtaaagcggacagtttgaaacttggggcatatgccaaccaaaacttcgtttctgcatgtcagaaaagtgcagtagaagcaaagctactggaacaaagatagaccttgacaacatagacactacttactggcaagccatggaactgtagcacctagggtttttgggtgggag

SEQ ID NO: 4144 - protein, 337 aa, Homosapiens; identical to SEQ ID NO: 588

SEQ ID NO: 4145 - DNA, 1669 bp, Homosapiens
ggcggcggcggcggcggcggtggtggctcgcgcagcttgttggctcgctatataaaggagagaagcgggcggaccggacggctggagctgcagccggtggcggcagcggcggcgcagggagcggtgaccggtggtggtttccctccttggcgcggggtggggagcgggcaacgccccccggacccctgaagggtcgtggctttttttttttttttaaggcgattctcgaggttttcagctgcgggaggagtgcccccctcctcctcctctctccgctctcccctactccttcaggattgattttgtttaaaattttttccccaatcttgcggtgatttgggtcaccctccgggtgttatagtttttttttttttggttttgtttttatcttgttttcttggggttgccccctcttgtttgtgttgtgtgtggaaatggcgaactcggcaaatacaaacaccgtgcctaaattatacagatctgtgattgaagatgtcattaatgatgtgagagacatctttctggatgatggagtggatgaacaagtactgatggaactaaaaactatcctgaataagacagttgctgcccagaagatgttcatactttggtagaaatggtagactttgtgtgttatgggaaaacaaactaatgcagtccagggcagtagatggatttcattcagaagagcagcagcttctactgcaagttcaacagcagcatcaaccccagcagcagcagcatcaccaccatcaccatcatcagcaagctcagcctcagcagacagtacctcagcaagcgcagacccagcaggttcttattcctgcatcacagcaagccacagcaccacaagttattgttccagattctaagttgatacagcatatgaatgcatcaaacatgagtgctgctgctacagctgctaccttagcactccctgcaggtgtgactcctgttcagcagatattaacaaattcaggccagcttcttcaggtggtcagagcagccaatggtgcccaatatatctttcagcctcagcagtcagtggttctacaacaacaggttataccacaaatgcagcctggtggagtacaagctcctgttatacagcaggtgctggctcctcttcctggagggatttcaccacagacaggtgtcatcatccagcctcagcaaatcttatttacaggaaataagactcaagttatacctacgacagtggcagcacctacaccagcccaagcacagataactgcaactggccagcagcaaccgcaggcccagcctgctcaaacacaagctccattggtcttacaagttgatggaactggggatacatcatctgaagaagatgaagatgaagaagaagactatgatgatgatgaggaggaagacaaagagaaagatggagctgaagatgggcaggtggaagaagagcccctcaatagtgaagatgatgtgagtgatgaggaaggacaggaactctttgacacagaaaatgttgttgtatgccaatatgataagatacacagaagtaaaaacaaatggaaatttcatctcaaggatggcattatgaatcttaatggaagagattatatattttccaaagccattggagatgcagaatggtgaagagttgctttttttcttttataaataaaagaaactt

SEQ ID NO: 4146 - protein, 326 aa, Homosapiens
MQSRAVDGFHSEEQQLLLQVQQQHQPQQQQHHHHHHHQQAQPQQTVPQQAQTQQVLIPASQQATAPQVIVPDSKLIQHMNASNMSAAATAATLALPAGVTPVQQILTNSGQLLQVVRAANGAQYIFQPQQSVVLQQQVIPQMQPGGVQAPVIQQVLAPLPGGISPQTGVIIQPQQILFTGNKTQVIPTTVAAPTPAQAQITATGQQQPQAQPAQTQAPLVLQVDGTGDTSSEEDEDEEEDYDDDEEEDKEKDGAEDGQVEEEPLNSEDDVSDEEGQELFDTENVVVCQYDKIHRSKNKWKFHLKDGIMNLNGRDYIFSKAIGDAEW

SEQ ID NO: 4147 - DNA, 860 bp, Homosapiens
ggccattcctagcgaggcagtaggcaccgcctctgtcacatttcctagctcctaaagcgcgggaccaggcggaaacgtgcgacaggaggcggtcccacctagctttggactggagtgtcagtagaactcccgtcttttccagcaacgctttgcaagttcttcaccgcaaagaactgccgcagacttccgcctgggtgccaaccacgtgatcacgcgagcgttggagaggccctaaattatacagatctgtgattgaagatgtcattaatgatgtgagagacatctttctggatgatggagtggatgaacaagtactgatggaactaaaaactttatgggaaaacaaactaatgcagtccagggcagtagatggatttcattcagaagagcagcagcttctactgcaagttcaacagcagcatcaaccccagcagcagcagcatcaccaccatcaccatcatcagcaagctcagcctcagcagacagtacctcagcaagcgcagacccagcaggttcttattcctgcatcacagcaagccacagcaccacaagttattgttccagattctaagttgatacagcatatgaatgcatcaaacatgagtgctgctgctacagctgctaccttagcactccctgcaggtgtgactcctgttcagcagatattaacaaattcaggtaattaggaatgatggaaccattttaaaatgtaattcagaaaattgtactatctagcccttaggttttgtcttctttgaaagacagaaaatactaatatttcttttaccatttggtttaggttattaaaataactttatttgagggctgtaacacatataactgtaatcgttgttgaggat

SEQ ID NO: 4148 - protein, 122 aa, Homosapiens
MELKTLWENKLMQSRAVDGFHSEEQQLLLQVQQQHQPQQQQHHHHHHHQQAQPQQTVPQQAQTQQVLIPASQQATAPQVIVPDSKLIQHMNASNMSAAATAATLALPAGVTPVQQILTNSGN

SEQ ID NO: 4149 - DNA, 1128 bp, Homosapiens
agaacttgcaaagcgttgctggaaaagacgggagttctactgacactccagtccaaagctaggtgggaccgcctcctgtcgcacgtttccgcctggtcccgcgctttaggagctaggaaatgtgacagaggcggtgcctactgcctcgctaggaatggccgcggaggaggactggtcacgtggcgtggcttccggcctctggcgcgttcctattcgggaaggttttaaatgcggagtcatctcttgatttgtcagcgaggctttgactgtgagcttcgcggcgttcgcgcctcaccgcctcaccgaggtgggtacgctgcgaagactaggcttatgttacccagaggttagtcctctactaggccacgtactttaaataatttatcacgctagtggaaatgcggggtggaagaaaaccccaccagcctttggattgtaacagcacagtaactttccctggtttttaaaaatattgccaaaatactgcgactccatgtggccaacgtatagtgactgatcactttgaaatgcatgcccttgacccaccaactcgcatggcctctcgctataagagagcaagccggctgtgttccatgttcaattcaataagtgcaattcaataagcttttgacttgttctgcccaagcaaatcctgcctttatatcgaccttgcaagcagaacagagaatgctgtttggaaggcagaattcatagtacctagttttcttgtccctgggaattttgagggacttgaaatgtcgcgtggatgagtgagggagtttgtcttccagagacaaagcaaaacgaaacgtcaaagttctgtgctggtgaaaccagatttgaagaatatcaaaggcgtcttaccaaagaggaaaaaaaatgcatcttgccaagacttgaagaaagggattagagaaaccagaggccttgaatactcagaaaatgggagattgtgaatgggtgtagaggatatctatgaaccttgacatttcttttcacgccaagtccattcccctgttaacagttgcttcccagtttcctgcacagctgcatggtctgggacacttaaagaaaaaaatcacaggaaatcagtgttcttggtatattatataaagttatgattctatc

SEQ ID NO: 4150 - protein, 40 aa, Homosapiens
MRSHLLICQRGFDCELRGVRASPPHRGGYAAKTRLMLPRG

SEQ ID NO: 4151 - DNA, 1829 bp, Homosapiens
ggttttaaatgcggagtcatctcttgatttgtcagcgaggctttgactgtgagcttcgcggcgttcgcgcctcaccgcctcaccgaggtgggtacgctgcgaagactaggcttatgttacccagaggttagtcctctactaggccacgtactttaaataatttatcacgctagtggaaatgcggggtggaagaaaaccccaccagcctttggattgtaacagcacagtaactttccctggtttttaaaaatattgccaaaatactgcgactccatgtggccaacgtatagtgactgatcactttgaaatgcatgcccttgacccaccaactcgcatggcctctcgctataagagagcaagccggctgtgttccatgttcaattcaataagtgcaattcaataagcttttgacttgttctgcccaagcaaatcctgcctttatatcgaccttgcaagcagaacagagaatgctgtttggaaggcagaattcatagtacctagttttcttgtccctgggaattttgagggacttgaaatgtcgcgtggatgagtgagggagtttgtcttccagagacaaagcaaaacgaaacgtcaaagttctgtgctggtgaaaccagatttgaagaatatcaaaggcgtcttaccaaagaggaaaaaaaatgcatcttgccaagacttgaagaaagggattagagaaaccagaggccttgaatactcagaaaatgggagattgtgaatgggtgtagaggatatctatgaaccttgacatttcttttcacgccaagtccattcccctgttaacagttgcttcccagtttcctgcacagctgcatggtctgggacacttaaagaaaaaaatcacaggaaatcagtgttcttggtatattatataaagttatgattctatcaacatttgtaattcatttaatattcaggtgacagcccgaaaatttacactaaacaataccattcctgttaagttttactacatattgagaggacttcttgttacctccctattacatactcccaaacgctttgcacatggaatccctcaccttccacctagttttcccccctactattgatattcttgactaaaaggttgagtagtttcgccatcaattaaagttaaaaccactgcagacaggacagggaagaaaagctacgaggtttgctcttcacagaattaatctgtgaaataatggattgtagttactggattaaaatggcagaaaacctagtcttggcctccttaagaccatcagactccctggaggctctgagttggcttctctctttacacctagattgcaacaagacctaagcacttggttaatatttacccaggaacttagattgcttgtgtgtctggcatctagccatcatggattccattccaatatattggttttccagtccctcaatagctgttatatgccttcattgcaacatatgtgtgccatccagtttagtttcggaaagaaatattttctgttataccaaaattgtaggactgaatacttggaagctgcagccctttaattcacaaaacaaaatttgtgagagaaaacttctcccaagtaagattacatttagcatcatatttaaattgtttctatctgaactttttattcttggtctcctacagcttgaatgacgtttctaactttaacagctctttctactatataaaacatttatacaggatttgctgtttgtgatcttacactttgtagcagctatgtacttagatagatacataatagtactctccttgtgatgaatgtttatgtgttttttttaacttcaaaatgatttatactggg

SEQ ID NO: 4152 - protein, 40 aa, Homosapiens; identical to SEQ ID NO: 4150

SEQ ID NO: 4153 - DNA, 2503 bp, Homosapiens
atgagcagggcctagaaaaaccattccgtgagttcaagctggagatctgtcatgagatttcagaaccccggcttcaaaactatgatgagaatggcagaatccacagcttgcggatagaccgtgtcacctataaagagaagaagaaataccagcccaaacctgctgtggcccacacagcagagagggaacaggtgattaagctgggcaccaccaattacgatgacttcctgagtttcatccatgcagttcaggaccgtctcatggatctgccagtgttgtcaatggacttgagcacagttggcctcaactaccttgaagaggagattacagtggatgtcagagatgaattctctggcattgtgagcaaaggagacaaccagattctccagcaccatgtcttgacacggatccacatcctgagtttcctgtctgggctcgcagagtgccgcctgggcctcaatgacatcctcgtcaaagggaatgaaatagttttgaggcaggacatcatgcccaccaccaccacaaagtggatcaagctccatgagtgccgtttccatgggtgtgtggatgaggatgttttccacaactcacgggtcattctgttcaaccctttggatgcgtgccggtttgagctaatgcggttcaggacagtgtttgctgagaagaccttgcctttcacactcaggacggccacaagtgtcaatggggcagaggtggaggtgcagagctggctgaggatgtcaactggcttctccgccaatcgtgaccccctcactcaggttccctgtgagaatgtgatgatccgttaccctgtgcccagtgagtgggtgaaaaacttccgcagggaaagtgtcctgggggaaaagtctttgaaagccaaagtgaaccggggggcaagttttggctccactagtgtttctggctctgagcctgtcatgagagtaactctgggaactgccaagtacgagcatgccttcaactccattgtgtggaggataaaccgactgccggacaaaaactcagcttccggtcacccacactgtttcttttgccaccttgaactcggctctgaccgggaagtgccttccagatttgccaatcacgtgaatgtcgagttcagcatgcccacaacttctgcctccaaagccagcgtgagatctatctctgtagaagacaagactgacgtcaggaagtgggtcaattattctgcacactacagctaccagacaacagaaacagacaaccttccaaatcctctatattgcagttgccttccacacacagatttaaaaagaggatcaaagagggtggtgaagatcaggtggaatgcttctttggaagttccactggcatcatctatcagaacaatggtgtgagcatgaagaggcacagacaggtctccaaaatagatgttaggatttgggtgctacctgacacagaagtaggtctaaccctccaagtactggggatgataggataatcaatgaggtatatatatatttgtcattttgtataaaatattgtgaaaattgaaggaggacactcagtaaacatcctgggactatttgtaagttatggcaaaaccagatgagagaaaagggacagtcccctctgtatcctcgttgtctcttagtaacatcaaattgtagttaaaaaaattttaaactatgtacaagctacaaaatagcatctctttcatggtatgtttgagtgtgtaattttagtttcttttctggttgtatttgtggtagtcagatgtgttggattgattccaactggacagagtaaggaattccagcatcctcttcctgcttgctcgtgttaccccacagatcaaaccctcaattctagttggggatgctgtctagccccacaccatgactgaagccttaagcactgttgcgcctccatgtgctttggatcagcaaccccagtggtattctaccagagcattgtgggaaagcagatgtatagtcaggtcccaacagcaaattgttgggtgtgagagttctaaagtataggggtgagggaagagaaggatatgaactcctctgaccttaagccagcattcatttaacttttatgtctacttaacaagagaacctggagaaaactaccgtattcaagagattaatcaaaatcagtgttttagccaggcgatgacagagaagcaccattcctcaccctccattcttgtaatgtctgtaataaatttcagtgcgtcaggatggatgaacccaagatccagtgaatgattcagctgttccaagccttacattttccatcattcatcatccattctcattcagtgtaacctcttgcactattgtggttaattttatgtaaaaccagtttatgtttttttttttttaatatgtgcctatgtaataaagtctacacactggctatctctgtagaggtgaggttttgtttttagttgttctactgattatatccttttctgagctatgaaaatgaattattaataaaaaatttttgaaca

SEQ ID NO: 4154 - protein, 371 aa, Homosapiens
MDLPVLSMDLSTVGLNYLEEEITVDVRDEFSGIVSKGDNQILQHHVLTRIHILSFLSGLAECRLGLNDILVKGNEIVLRQDIMPTTTTKWIKLHECRFHGCVDEDVFHNSRVILFNPLDACRFELMRFRTVFAEKTLPFTLRTATSVNGAEVEVQSWLRMSTGFSANRDPLTQVPCENVMIRYPVPSEWVKNFRRESVLGEKSLKAKVNRGASFGSTSVSGSEPVMRVTLGTAKYEHAFNSIVWRINRLPDKNSASGHPHCFFCHLELGSDREVPSRFANHVNVEFSMPTTSASKASVRSISVEDKTDVRKWVNYSAHYSYQTTETDNLPNPLYCSCLPHTDLKRGSKRVVKIRWNASLEVPLASSIRTMV

SEQ ID NO: 4155 - DNA, 2415 bp, Homosapiens
atgagcagggcctagaaaaaccattccgtgagttcaagctggagatctgtcatgagatttcagaaccccggcttcaaaactatgatgagaatggcagaatccacagcttgcggatagaccgtgtcacctataaagagaagaagaaataccagcccaaacctgctgtggcccacacagcagagagggaacaggtgattaagctgggcaccaccaattacgatgacttcctgagtttcatccatgcagttcaggaccgtctcatggatctgccagtgttgtcaatggacttgagcacagttggcctcaactaccttgaagaggagattacagtggatgtcagagatgaattctctggcattgtgagcaaaggagacaaccagattctccagcaccatgtcttgacacggatccacatcctgagtttcctgtctgggctcgcagagtgccgcctgggcctcaatgacatcctcgtcaaagggaatgaaatagttttgaggcaggacatcatgcccaccaccaccacaaagtggatcaagctccatgagtgccgtttccatgggtgtgtggatgaggatgttttccacaactcacgggtcattctgttcaaccctttggatgcgtgccggtttgagctaatgcggttcaggacagtgtttgctgagaagaccttgcctttcacactcaggacggccacaagtgtcaatggggcagaggtggaggtgcagagctggctgaggatgtcaactggcttctccgccaatcgtgaccccctcactcaggttccctgtgagaatgtgatgatccgttaccctgtgcccagtgagtgggtgaaaaacttccgcagggaaagtgtcctgggggaaaagtctttgaaagccaaagtgaaccggggggcaagttttggctccactagtgtttctggctctgagcctgtcatgagagtaactctgggaactgccaagtacgagcatgccttcaactccattgtgtggaggataaaccgactgccggacaaaaactcagcttccggtcacccacactgtttcttttgccaccttgaactcggctctgaccgggaagtgccttccagatttgccaatcacgtgaatgtcgagttcagcatgcccacaacttctgcctccaaagccagcgtgagatctatctctgtagaagacaagactgacgtcaggaagtgggtcaattattctgcacactacagctaccagacaacagaaacagacaaccttccaaatcctctatattgcagttgccttccacacacagatttaaaaagaggatcaaagagggtggtgaagatcaggtggaatgcttctttggaagttccactggcatcatctatcagaacaatggtgtgagcatgaagaggcacagacaggtctccaaaatagatgttaggatttgggtgctacctgacacagaagtaggtctaaccctccaagtactggggatgataggataatcaatgaggtatatatatatttgtcattttgtataaaatattgtgaaaattgaaggaggacactcagtaaacatcctgggactatttgtaagttatggcaaaaccagatgagagaaaagggacagtcccctctgtatcctcgttgtctcttagtaacatcaaattgtagttaaaaaaattttaaactatgtacaagctacaaaatagcatctctttcatggtatgtttgagtgtgtaattttagtttcttttctggttgtatttgtggtagtcagatgtgttggattgattccaactggacagagtaaggaattccagcatcctcttcctgcttgctcgtgttaccccacagatcaaaccctcaattctagttggggatgctgtctagccccacaccatgactgaagccttaagcactgttgcgcctccatgtgctttggatcagcaaccccagtggtattctaccagagcattgtgggaaagcagatgtatagtcaggtcccaacagcaaattgttgggtgtgagagttctaaagtataggggtgagggaagagaaggatatgaactcctctgaccttaagccagcattcatttaacttttatgtctacttaacaagagaacctggagaaaactaccgtattcaagagattaatcaaaatcagtgttttagccaggcgatgacagagaagcaccattcctcaccctccattcttgtaatgtctgtaataaatttcagtgcgtcaggatggatgaacccaagatccagtgaatgattcagctgttccaagccttacattttccatcattcatcatccattctcattcagtgtaacctcttgcactattgtggttaattttatgtaaaaccagtttatgtttttttttttttaatatgtgcctatgtaataaagtctacacactggctatctctgt

SEQ ID NO: 4156 - protein, 371 aa, Homosapiens; identical to SEQ ID NO: 4154

SEQ ID NO: 4157 - DNA, 688 bp, Homosapiens
gtggaggataaaccgactgccggacaaaaactcagcttccggtcacccacactgtttcttttgccaccttgaactcggctctgaccgggaagtgccttccagatttgccaatcacgtgaatgtcgagttcagcatgcccacaacttctgcctccaaagccagcgtgagatctatctctgtagaagacaagactgacgtcaggaagtgggtcaattattctgcacactacagctaccaggtggaaattgagcaaaaaaagagtttgaagccggactttgaaggagatgaaatggaaaatcccaaggagtgtggagtgcagtgacaaagccttgcggcaaggaatcctgatcccagagtcatgatagggtgtcttcctgagtcatgatagggtgtcttcctgagtagctgaagttgcagtcaatacctgctgtggccactgcatgttgggaacagtataccagatcttcctgtttgcagttacttgtattttaccaggaaaccctgagaatggtggcttttggagaggctctttgattctggtcatgcctaaagcacgaggttcacctgactgttggagcttactgtataattaagcctccttgtcttgtctctgcttatctcacagcactggtatgtggtttgttgtgactgttacagtcaggaaaagaacctcccacatcagtgttag

SEQ ID NO: 4158 - protein, 62 aa, Homosapiens
MPTTSASKASVRSISVEDKTDVRKWVNYSAHYSYQVEIEQKKSLKPDFEGDEMENPKECGVQ

SEQ ID NO: 4159 - DNA, 2352 bp, Homosapiens
tccctcattcctatacttcagttttccttacctctagagcccctgaacagtagctcatatgttctccttttccttttagacaattcctcctcgcttcaagaagatgaagaagtagagatggaggccatcagctggcaggccagcagtccagccatgaatgggcaccctgcccctccagtgacctctgctcgttttcccagctgggtcacctttgatgacaatgaagtcagctgccctttaccaccagtcacctctcctctgaagccaaatacaccaccaagtgcatctgtgatcccagatgtaccttataattcaatgggatcatttaagaagagggaccgtcccaagagcactttgatgaacttctccaaagttcagaagctggatatttcctctttaaaccgcacgccttctgtaactgaggcttcaccttggagggcaaccaaccctttcctgaatgagactctgcaggatgtacagccctcccctatcaaccctttcagtgctttctttgaggagcaggagaggcgctcccaaaacagttccatttccagtaccacgggcaaaagccaaagagattccctcattgtcatctaccaggatgccatcagttttgatgattcaagcaaaacccagtcacactctgatgctgttgaaaaactcaaacaactccaaattgatgaccctgatcactttggcagtgcaactctacctgatgatgacccagtagcctggattgaactagatgctcacccgcctggatcagcacggtcccagcctcgtgacgggtggccaatgatgttgaggatccctgagaagaaaaacatcatgtcctccaggcactggggaccgatcttcgtcaaactgacagacactggttacctgcagctgtattatgagcagggcctagaaaaaccattccgtgagttcaagctggagatctgtcatgagatttcagaaccccggcttcaaaactatgatgagaatggcagaatccacagcttgcggatagaccgtgtcacctataaagagaagaagaaataccagcccaaacctgctgtggcccacacagcagagagggaacaggtgattaagctgggcaccaccaattacgatgacttcctgagtttcatccatgcagttcaggaccgtctcatggatctgccagtgttgtcaatggacttgagcacagttggcctcaactaccttgaagaggagattacagtggatgtcagagatgaattctctggcattgtgagcaaaggagacaaccagattctccagcaccatgtcttgacacggatccacatcctgagtttcctgtctgggctcgcagagtgccgcctgggcctcaatgacatcctcgtcaaagggaatgaaatagttttgaggcaggacatcatgcccaccaccaccacaaagtggatcaagctccatgagtgccgtttccatgggtgtgtggatgaggatgttttccacaactcacgggtcattctgttcaaccctttggatgcgtgccggtttgagctaatgcggttcaggacagtgtttgctgagaagaccttgcctttcacactcaggacggccacaagtgtcaatggggcagaggtggaggtgcagagctggctgaggatgtcaactggcttctccgccaatcgtgaccccctcactcaggttccctgtgagaatgtgatgatccgttaccctgtgcccagtgagtgggtgaaaaacttccgcagggaaagtgtcctgggggaaaagtctttgaaagccaaagtgaaccggggggcaagttttggctccactagtgtttctggctctgagcctgtcatgagagtaactctgggaactgccaagtacgagcatgccttcaactccattgtgtggaggataaaccgactgccggacaaaaactcagcttccggtcacccacactgtttcttttgccaccttgaactcggctctgaccgggaagtgccttccagatttgccaatcacgtgaatgtcgagttcagcatgcccacaacttctgcctccaaagccagcgtgagatctatctctgtagaagacaagactgacgtcaggaagtgggtcaattattctgcacactacagctaccaggtagccttgggaagcatctggctaatgcttccaactccatttgttcaccccactaccctccccctcttattccttttagccatgcttactatgttcgcctggtaacctcttactgccttagaggaagttcaccatacatagctgtgggtgcgtctgctctgatttaaatgcataatctggctagtggatgagagaaaggttggaaaaaaataaagaggctcatcaaagagg

SEQ ID NO: 4160 - protein, 702 aa, Homosapiens
MEAISWQASSPAMNGHPAPPVTSARFPSWVTFDDNEVSCPLPPVTSPLKPNTPPSASVIPDVPYNSMGSFKKRDRPKSTLMNFSKVQKLDISSLNRTPSVTEASPWRATNPFLNETLQDVQPSPINPFSAFFEEQERRSQNSSISSTTGKSQRDSLIVIYQDAISFDDSSKTQSHSDAVEKLKQLQIDDPDHFGSATLPDDDPVAWIELDAHPPGSARSQPRDGWPMMLRIPEKKNIMSSRHWGPIFVKLTDTGYLQLYYEQGLEKPFREFKLEICHEISEPRLQNYDENGRIHSLRIDRVTYKEKKKYQPKPAVAHTAEREQVIKLGTTNYDDFLSFIHAVQDRLMDLPVLSMDLSTVGLNYLEEEITVDVRDEFSGIVSKGDNQILQHHVLTRIHILSFLSGLAECRLGLNDILVKGNEIVLRQDIMPTTTTKWIKLHECRFHGCVDEDVFHNSRVILFNPLDACRFELMRFRTVFAEKTLPFTLRTATSVNGAEVEVQSWLRMSTGFSANRDPLTQVPCENVMIRYPVPSEWVKNFRRESVLGEKSLKAKVNRGASFGSTSVSGSEPVMRVTLGTAKYEHAFNSIVWRINRLPDKNSASGHPHCFFCHLELGSDREVPSRFANHVNVEFSMPTTSASKASVRSISVEDKTDVRKWVNYSAHYSYQVALGSIWLMLPTPFVHPTTLPLLFLLAMLTMFAW

SEQ ID NO: 4161 - DNA, 2919 bp, Homosapiens; identical to SEQ ID NO: 589

SEQ ID NO: 4162 - protein, 905 aa, Homosapiens; identical to SEQ ID NO: 590

SEQ ID NO: 4163 - DNA, 376 bp, Homosapiens
tctgattaatcctgaaatgaagcctttcacaaatggataataacttgttggtttggaggaagcatgggtgttcataaacaaaggcatggcagtaatacagctgagggagatggagcggagggcgacggaacagatcgagagagcaacctcagagtatgcacccagcacacaagaacggcaaaataaatgcttgaagttttattaatgaagcaaacatggcattggccaccctgatttttgccacgctgtgttcctaaaagccacactataaagtggatcctattttcccttaggaacaatgttgtaattacgggttctgttccaagacctcatgttggtttcctataaattcaagacataatcaataaaatcttgt

SEQ ID NO: 4164 - protein, 40 aa, Homosapiens
MGVHKQRHGSNTAEGDGAEGDGTDRESNLRVCTQHTRTAK

SEQ ID NO: 4165 - DNA, 1326 bp, Homosapiens
attaacatcacttccccagggcgaggaactccatgtgaggctctgggggaacctgactatgtgcagtcgtttacagcctgggtctcctggagcctatgaaatgagaagcagtcattagcacagcaagcggccctcatccttccttctcaataataacactgtcaccagaggatggaaaattaccctgacgtctctgtatctccaaattgcacttcagagacagactgcgtaaggcaaacagaccctgagtgaaaacctcctggctagacttccaagccaaggcctaataaataaccctgaaatatacaaagtgatggcagctttgctctgtggctcgtggcttctgccctgggaaggaccatgaatttcagcgtctgacagatggggtcagaaagtggagtctgcctggtgggttgaggatctgcaaattaaccccatggtggtggtttcagaacaagtgtgcctgctcacgcaaagactaacctctaagaaaggagcaggcccggaggtgaggccccctgggcgtgaaagaatcaaccccagtccacaaagtccggagatgagacatcctgcctggaggagggagccctgtgcatcgcaggatcaaagaagccaaacaggatctttagtggtgaccgaaaatgctcatgaggagaaaggctgcatggcattaagtgaaccccattgaaagggcccagtgaacagagcccctggacattgccggaaggaaaggagaaagcccagcaaagcacacaacgtatcaggcttttcatgtgtcattgggtgaaagggagtcacatgggccaaggaggggaagcaggtgtcatcagagcagttccacagccctctaggcacagtaacaggcatgctttctgtccttctctccttttagattgtaagctacccaaagtccatctccatgggtttttttccttatgtgcaaactaccatatgacaggtgtgcctgacaataactcaggtatagctgagaatgatcctgtagtccaagaatgttggttctgagctctgaactaaggaatctgggagctgccaacccagaggtttactccttatctatggagcataggtgaacccctggcccatttcttggaacagcatgtgcggggaaccaaggccctttgttttgagctaggtggaggtggccaggtagaggtcgccaggaagaggtggccaggtggaggttgctaagcaaagattgctatattaactgggtgctttttagaaaccatagtggttaccccattcatccagccactcctggactccctgtacgtttaagttgcccaataaaacttatgtcttgct

SEQ ID NO: 4166 - protein, 83 aa, Homosapiens [sequence omitted]

SEQ ID NO: 4167 - DNA, 2626 bp, Homosapiens
gtacaaaccgatggcatctcccaggcatttctgaaccattttcacgtgcctctactctccggccgtctccacaccaccctgtgttctgccaaagggagctaaaatgagccctgttttaccaaaccactcaagcacggctgacacagtgtgttgctgcagaaggatcggggtgggtgggagtagggacagtgcagagagaaagaaaggagtgcatgctacatctctccctctccaagaggacttggcagaaagcccatgcatgtttcaagcttgttttgacagttccatgacaggagtcatagggctgtagctgtagaaagcccaagaaacacatttttgttatcccatcaaaatcttcccggggagctacattgttggggcaagttatgtgtcatcactggcatcaaaagagaaaaagaaatgaatgatctggctcaggtgccaaggctctcgtcctgaggagggaaatgacatttattgagcccctgcaatagcaacaacaaattattattattgggcactttgcatgtgccaggcactgggataaaacacaggcatggactcagcaatcccgatgactgtccttggatacaggctgtgctaattatcccccttttaaagaccaggcaatggaggcgcagaggggccaggtgatgtgcccgaggctgcatggcagtaagtggcgaaggtgggatttgaactggtttgcctctcccagagtccaaatccttccttgcaacgcagagctgctctgactgtaaggagtgtggggtctctcctcagagtcccagatactcaggatctcatttaatcttcgcaacaaccctgaggcataggggtttttagatctgctttacagatgaagaaactgaggtccagggaggcttagtgatgcccaaagccacacctccagaagcagcaggatctgcaggcacagctgggtgtcctggccctgggtcaagcgactttcctactgacttccacccacaagggctgcatgatggttaatactgagtaacaacttgatcagattgaaggatgcaaagtattgtttctgggtgtgtcttcgagggtgttgccaaaggagattaatatttgagtcagtgggctagggaaggcagacccacccttaatctggtgggcacaatctaatcagctgccaacgaatataaagcaggcagaaaaatgtgaaaaggcgagactggcttagcctccagcccatatctttctcccgtgctggatgcttcctgccctcgaacatcagactccaagttcttcagttttgggactctgcctggctctccttgctcttcaagcctgcagatggcctattgtgggaccttgtgatcatagaagaacaacctcctgcccttgccctgaatcctgaggaaggtgatgcactcacaacaagggcatcccagtcctggggaagggcaggaaggacccaccctcatcagtccctgacaactcccacccttgtccttggtcaccttggaaatgaaaaggttctcagaaggcagtcacatctggacagcattccttgactacgcatcaatattccatcatgtcattgccggctgtgaggaggaaagtgacctcctaaacaaatccgtgcacgtgtaaatgacagctgctggtttgaatctgtttcttctcccaccacttcctcttctgatcaaagagcccaccttttcatttggaggaaccatttctcaactggtctcattctgtgaggtttagagttctctttttgaggcagttcaagtggaaaaagaaataacctagaagcaagtaaaacaaccttattcaaaaacaacaaaaatccttcagggttttcacaaacgtagtgaattttcagcttgtaatttgctgtctccggtgagcgcggtgctgagaagacccgtgatgctctctttgaagcccatttgcggcatgccccaggcctgggacctccattaagcaccagggcctcgccaagcaccgatatttgttgagtaccttccatttgctaaatactgtgctttgaaggcactgggaattcaatgatgagcaaagtagatatggtccttgacctcatggagcttgagggaaaatgaagaagacattcacctaaataaatagataattgcaaaatttaatacatcaaatttaagtcaatattattgagatataattacatacaataaaattcacacatatgaagtctataggtcaatgacttttgacaaatgccaccatttatgtaaccaacatcctaattaagatatagaacatttccatcatttccatctctccaaaagcttcctcacatgccttcccagtcaatctccccgtatctaaatcctactatctgcttaccacctctgattatttttgcctactttagaatttcatataaatggaataatacagcatacattgttttgtgtatgttttctttccctcagcctaatgtctctgagattcccccatgttgctgtgtgtagcatgacctgttcctttatatggctgagtatgtacataagggtgtaccacaatttgtttatcaattcacctgttgatggacatttgggttgtttacagcttttgtcaatttttaataaagcttctgtatacatttgtgttc

SEQ ID NO: 4168 - protein, 48 aa, Homosapiens
MLPALEHQTPSSSVLGLCLALLALQACRWPIVGPCDHRRTTSCPCPES

SEQ ID NO: 4169 - DNA, 4962 bp, Homosapiens
gccttggtcattggaccggctcccaaccaaaaccacaccatagggttttctgctcttggccaacccaacatgagaaaagaggaattaaatggtcctactaataagaaagcctcagcgtagcattaagggacgtagcaggtcttctggccacactcccctacaaatgtggaaagctcattggtgaaaacagttctcaggggtcaaagcaaaggaactgatctgggtaaagtagaggctgcctgatcccaatcagacatcctcacctctcaataacctttgccatttctctgccatagagtgaaagtgtccccaggccaaaagcccagggctccaggctgccatcaggatggtgggtgaaggaccctaccttatctcagatctggaccagcgaggccggcggagatcctttgcagaaagatatgaccccagcctgaagaccatgatcccagtgcgaccctgtgcaaggttagcacccaacccggtggatgatgccgggctactctccttcgccacattttcctggctcacgccggtgatggtgaaaggctaccggcaaaggctgaccgtagacaccctgcccccattgtcgacatatgactcatctgacaccaatgccaaaagatttcgagtcctttgggatgaagaggtagcaagggtgggtcctgagaaggcctctctgagccacgtggtgtggaaattccagaggacacgcgtgttgatggacatcgtggccaacatcctgtgcatcatcatggcagccatagggccgacagttctcattcaccaaatcctccagcagactgagaggacctctgggaaagtctgggttggcattggactgtgcatagccctttttgccaccgagtttaccaaagtcttcttttgggcccttgcctgggccatcaactaccgcacggccatccggttgaaggtggcgctctccaccttggtttttgaaaacctagtgtccttcaagacattgacccacatctctgttggcgaggtgctcaatatactgtcaagtgatagctattctttgtttgaagctgccttgttttgtcctttgccagccaccatcccgatcctaatggtcttttgtgcggcgtacgcctttttcattctggggcccacagctctcatcgggatatcagtgtatgtcatattcatacccgtccagatgtttatggccaagctcaattcagctttccgaaggtcagcaattttggtgacagacaagcgagttcagacaatgaatgagtttctgacctgcatcaggctgatcaaaatgtatgcctgggagaaatcttttaccaacactatccaagatataagaaggagggaaagaaaattactggaaaaagctggatttgtccaaagtggaaactctgccctggcccccatcgtgtccaccatagccatcgtgctgacattatcctgccacatcctcctgagacgcaaactcaccgcacccgtggcatttagtgtgattgccatgtttaatgtaatgaagttttccattgcaatcttgcccttctccatcaaagcaatggctgaagcgaatgtctctctaaggagaatgaagaaaattctcatagataaaagccccccatcttacatcacccaaccagaagacccagatactgtcttgcttttagcaaatgccaccttgacatgggagcatgaagccagcaggaaaagtaccccaaagaaattgcagaaccagaaaaggcatttatgcaagaaacagaggtcagaggcatacagtgagaggagtccaccagccaagggagccactggcccagaggagcaaagtgacagcctcaaatcggttctgcacagcataagctttgtggtgagaaaggggaagatcttgggaatatgtgggaatgtgggaagtggaaagagctccctccttgcagctctcctaggacagatgcagctgcagaaaggggtggtggcagtcaatggaactttggcctacgtttcacagcaggcatggatctttcatggaaatgtgagagaaaacatactctttggagaaaagtatgatcaccaaaggtatcagcacacagtccgcgtctgtggcctccagaaggacctgagcaacctcccctatggagacctgactgagattggggagcggggcctcaacctctctggggggcagaggcagaggattagcctggcccgcgctgtctactccgaccgtcagctctacctgctggacgaccccctgtcggccgtggacgcccacgtggggaagcacgtctttgaggagtgcattaagaagacgctcaggggaaagacagtcgtcctggtgacccaccagctacagttcttagagtcttgtgatgaagttattttattagaagatggagagatttgtgaaaagggaacccacaaggagttaatggaggagagagggcgctatgcaaaactgattcacaacctgcgaggattgcagttcaaggatcctgaacacctttacaatgcagcaatggtggaagccttcaaggagagccctgctgagagagaggaagatgctgttttggctccaggaaatgagaaagatgaaggaaaagaatctgaaacaggctcagaatttgtagacacaaaagttcctgagcaccagctcatccagactgaatccccccaggaaggaaccgtgacctggaaaacatatcacacgtacattaaggcttctggagggtacctcctttctctcttcactgtgttcctcttcctcctgatgattggcagcgctgccttcagcaactggtggctgggtctctggttggacaagggctcacggatgacctgtgggccccagggcaacaggaccatgtgtgaggtcggcgcggtgctggcagacatcggtcagcatgtgtaccagtgggtgtacactgcaagcatggtgttcatgctggtgtttggcgtcaccaaaggcttcgtcttcaccaagaccacactgatggcatcctcctctctgcatgacacggtgtttgataagcattttccacagaggagtccaggagctcaagaaggtggagaatgtcagccggtcaccctggttcacccacatcacctcctccatgcagggcctgggcatcattcacgcctatggcaagaaggagagctgcatcacctagtttaagacgctaaacgacgaaaactccagtcacctcctctactttaactgtgctctcaggtggtttgcgctgagaatggatgtcctcatgaacatccttaccttcactgtggccttgttggtgaccctgagtttctcctccatcagtacttcatccaaaggcctgtcattgtcatacatcatccagctgagcggactgctccaagtgtgtgtgcgaacgggaacagagacgcaagccaaattcacctccgtggagctgctcagggaatacatttcgacctgtgttcctgaatgcactcatcccctcaaagtggggacctgtcccaaggactggcccagccgtggggagatcaccttcagagactatcagatgagatacagagacaacaccccccttgttctcgacagcctgaacttgaacatacaaagtgggcagacagtcgggattgttggaagaacaggttccggaaagtcatcgttaggaatggctttgtttcgtctggtggagccagccagtggcacaatctttattgatgaggtggatatctgcattctcagcttggaagacctcagaaccaagctgactgtgatcccacaggatcctgtcctgtttgtaggtacagtaaggtacaacttggatccctttgagagtcacaccgatgagatgctctggcaggttctggagagaacattcatgagagacacaataatgaaactcccagaaaaattacaggcagaagtcacagaaaatggagaaaacttctcagtaggggaacgtcagctgctttgtgtggcccgagctcttctccgtaattcaaagatcattctccttgatgaagccaccgcctctatggactccaagactgacaccctggttcagaacaccatcaaagatgccttcaagggctgcactgtgctgaccatcgcccaccgcctcaacacagttctcaactgcgatcacgtcctggttatggaaaatgggaaggtgattgagtttgacaagcctgaagtccttgcagagaagccagattctgcatttgcgatgttactagcagcagaagtcagattgtagaggtcctggcggctgattctagaggaggaagaggctctgtgagatgaataggaggagtcttcaggaggaggggctgtcctctccgcaggcagccctggtcttcagcccctcccatccacggagtgagctggggctgaagttgtccccactgccatactcagtccatgtcaccccacttggtgggcttggggttggttctgggtggtgaaccggggcagacccagctaatggattaaaaaactgcccttcacctcccaaatccccaagggttcctcatgtgttttcaccaaaaccaccccagtgcctgagattgaaaatattgtaactttcagttagaaatcagccacaataaacaacatgggaaaatgccttaggatggagtttgcaaggtttccttgcccattatcagaaggaaaaagagcagaattttcttctcgtttaaccccactcacttccatcttgactgggtgacaagtggtaatgacacagatttgtagcgtgaaagactgaatacagtgtttggccaaaaatttttttaaaaatcatattatatgtttcaattgatctgttagaataaccaagaaaacaaaatgctggagtttctctataaatgacacttttatatcttctttattcgtcgttaaaacgcggtaggaaattaccctgaaatgtcgccttgcaattatttcactgaagatattccaatttccatactatttcctccaatagacccttgttgcct

SEQ ID NO: 4170 - protein, 935 aa, Homosapiens
MVGEGPYLISDLDQRGRRRSFAERYDPSLKTMIPVRPCARLAPNPVDDAGLLSFATFSWLTPVMVKGYRQRLTVDTLPPLSTYDSSDTNAKRFRVLWDEEVARVGPEKASLSHVVWKFQRTRVLMDIVANILCIIMAAIGPTVLIHQILQQTERTSGKVWVGIGLCIALFATEFTKVFFWALAWAINYRTAIRLKVALSTLVFENLVSFKTLTHISVGEVLNILSSDSYSLFEAALFCPLPATIPILMVFCAAYAFFILGPTALIGISVYVIFIPVQMFMAKLNSAFRRSAILVTDKRVQTMNEFLTCIRLIKMYAWEKSFTNTIQDIRRRERKLLEKAGFVQSGNSALAPIVSTIAIVLTLSCHILLRRKLTAPVAFSVIAMFNVMKFSIAILPFSIKAMAEANVSLRRMKKILIDKSPPSYITQPEDPDTVLLLANATLTWEHEASRKSTPKKLQNQKRHLCKKQRSEAYSERSPPAKGATGPEEQSDSLKSVLHSISFVVRKGKILGICGNVGSGKSSLLAALLGQMQLQKGVVAVNGTLAYVSQQAWIFHGNVRENILFGEKYDHQRYQHTVRVCGLQKDLSNLPYGDLTEIGERGLNLSGGQRQRISLARAVYSDRQLYLLDDPLSAVDAHVGKHVFEECIKKTLRGKTVVLVTHQLQFLESCDEVILLEDGEICEKGTHKELMEERGRYAKLIHNLRGLQFKDPEHLYNAAMVEAFKESPAEREEDAVLAPGNEKDEGKESETGSEFVDTKVPEHQLIQTESPQEGTVTWKTYHTYIKASGGYLLSLFTVFLFLLMIGSAAFSNWWLGLWLDKGSRMTCGPQGNRTMCEVGAVLADIGQHVYQWVYTASMVFMLVFGVTKGFVFTKTTLMASSSLHDTVFDKHFPQRSPGAQEGGECQPVTLVHPHHLLHAGPGHHSRLWQEGELHHLV

SEQ ID NO: 4171 - DNA, 5189 bp, Homosapiens
gccttggtcattggaccggctcccaaccaaaaccacaccatagggttttctgctcttggccaacccaacatgagaaaagaggaattaaatggtcctactaataagaaagcctcagcgtagcattaagggacgtagcaggtcttctggccacactcccctacaaatgtggaaagctcattggtgaaaacagttctcaggggtcaaagcaaaggaactgatctgggtaaagtagaggctgcctgatcccaatcagacatcctcacctctcaataacctttgccatttctctgccatagagtgaaagtgtccccaggccaaaagcccagggctccaggctgccatcaggatggtgggtgaaggaccctaccttatctcagatctggaccagcgaggccggcggagatcctttgcagaaagatatgaccccagcctgaagaccatgatcccagtgcgaccctgtgcaaggttagcacccaacccggtggatgatgccgggctactctccttcgccacattttcctggctcacgccggtgatggtgaaaggctaccggcaaaggctgaccgtagacaccctgcccccattgtcgacatatgactcatctgacaccaatgccaaaagatttcgagtcctttgggatgaagaggtagcaagggtgggtcctgagaaggcctctctgagccacgtggtgtggaaattccagaggacacgcgtgttgatggacatcgtggccaacatcctgtgcatcatcatggcagccatagggccgacagttctcattcaccaaatcctccagcagactgagaggacctctgggaaagtctgggttggcattggactgtgcatagccctttttgccaccgagtttaccaaagtcttcttttgggcccttgcctgggccatcaactaccgcacggccatccggttgaaggtggcgctctccaccttggtttttgaaaacctagtgtccttcaagacattgacccacatctctgttggcgaggtgctcaatatactgtcaagtgatagctattctttgtttgaagctgccttgttttgtcctttgccagccaccatcccgatcctaatggtcttttgtgcggcgtacgcctttttcattctggggcccacagctctcatcgggatatcagtgtatgtcatattcatacccgtccagatgtttatggccaagctcaattcagctttccgaaggtcagcaattttggtgacagacaagcgagttcagacaatgaatgagtttctgacctgcatcaggctgatcaaaatgtatgcctgggagaaatcttttaccaacactatccaagatataagaaggagggaaagaaaattactggaaaaagctggatttgtccaaagtggaaactctgccctggcccccatcgtgtccaccatagccatcgtgctgacattatcctgccacatcctcctgagacgcaaactcaccgcacccgtggcatttagtgtgattgccatgtttaatgtaatgaagttttccattgcaatcttgcccttctccatcaaagcaatggctgaagcgaatgtctctctaaggagaatgaagaaaattctcatagataaaagccccccatcttacatcacccaaccagaagacccagatactgtcttgcttttagcaaatgccaccttgacatgggagcatgaagccagcaggaaaagtaccccaaagaaattgcagaaccagaaaaggcatttatgcaagaaacagaggtcagaggcatacagtgagaggagtccaccagccaagggagccactggcccagaggagcaaagtgacagcctcaaatcggttctgcacagcataagctttgtggtgagaaaggggaagatcttgggaatatgtgggaatgtgggaagtggaaagagctccctccttgcagctctcctaggacagatgcagctgcagaaaggggtggtggcagtcaatggaactttggcctacgtttcacagcaggcatggatctttcatggaaatgtgagagaaaacatactctttggagaaaagtatgatcaccaaaggtatcagcacacagtccgcgtctgtggcctccagaaggacctgagcaacctcccctatggagacctgactgagattggggagcggggcctcaacctctctggggggcagaggcagaggattagcctggcccgcgctgtctactccgaccgtcagctctacctgctggacgaccccctgtcggccgtggacgcccacgtggggaagcacgtctttgaggagtgcattaagaagacgctcaggggaaagacagtcgtcctggtgacccaccagctacagttcttagagtcttgtgatgaagttattttattagaagatggagagatttgtgaaaagggaacccacaaggagttaatggaggagagagggcgctatgcaaaactgattcacaacctgcgaggattgcagttcaaggatcctgaacacctttacaatgcagcaatggtggaagccttcaaggagagccctgctgagagagaggaagatgctgttttggctccaggaaatgagaaagatgaaggaaaagaatctgaaacaggctcagaatttgtagacacaaaagttcctgagcaccagctcatccagactgaatccccccaggaaggaaccgtgacctggaaaacatatcacacgtacattaaggcttctggagggtacctcctttctctcttcactgtgttcctcttcctcctgatgattggcagcgctgccttcagcaactggtggctgggtctctggttggacaagggctcacggatgacctgtgggccccagggcaacaggaccatgtgtgaggtcggcgcggtgctggcagacatcggtcagcatgtgtaccagtgggtgtacactgcaagcatggtgttcatgctggtgtttggcgtcaccaaaggcttcgtcttcaccaagaccacactgatggcatcctcctctctgcatgacacggtgtttgataagatcttaaagagcccaatgagtttctttgacacgactcccactggcaggctaatgaaccgtttttccaaggatatggacgagctggatgtgaggctgccgtttcacgcagagaactttctgcagcagttttttatggtggtgtttattctcgtgatcttggctgctgtgtttcctgctgtccttttagtcgtggccagccttgctgtaggcttcttcattctgttacgcattttccacagaggagtccaggagctcaagaaggtggagaatgtcagccggtcaccctggttcacccacatcacctcctccatgcagggcctgggcatcattcacgcctatggcaagaaggagagctgcatcacctagtttaagacgctaaacgacgaaaactccagtcacctcctctactttaactgtgctctcaggtggtttgcgctgagaatggatgtcctcatgaacatccttaccttcactgtggccttgttggtgaccctgagtttctcctccatcagtacttcatccaaaggcctgtcattgtcatacatcatccagctgagcggactgctccaagtgtgtgtgcgaacgggaacagagacgcaagccaaattcacctccgtggagctgctcagggaatacatttcgacctgtgttcctgaatgcactcatcccctcaaagtggggacctgtcccaaggactggcccagccgtggggagatcaccttcagagactatcagatgagatacagagacaacaccccccttgttctcgacagcctgaacttgaacatacaaagtgggcagacagtcgggattgttggaagaacaggttccggaaagtcatcgttaggaatggctttgtttcgtctggtggagccagccagtggcacaatctttattgatgaggtggatatctgcattctcagcttggaagacctcagaaccaagctgactgtgatcccacaggatcctgtcctgtttgtaggtacagtaaggtacaacttggatccctttgagagtcacaccgatgagatgctctggcaggttctggagagaacattcatgagagacacaataatgaaactcccagaaaaattacaggcagaagtcacagaaaatggagaaaacttctcagtaggggaacgtcagctgctttgtgtggcccgagctcttctccgtaattcaaagatcattctccttgatgaagccaccgcctctatggactccaagactgacaccctggttcagaacaccatcaaagatgccttcaagggctgcactgtgctgaccatcgcccaccgcctcaacacagttctcaactgcgatcacgtcctggttatggaaaatgggaaggtgattgagtttgacaagcctgaagtccttgcagagaagccagattctgcatttgcgatgttactagcagcagaagtcagattgtagaggtcctggcggctgattctagaggaggaagaggctctgtgagatgaataggaggagtcttcaggaggaggggctgtcctctccgcaggcagccctggtcttcagcccctcccatccacggagtgagctggggctgaagttgtccccactgccatactcagtccatgtcaccccacttggtgggcttggggttggttctgggtggtgaaccggggcagacccagctaatggattaaaaaactgcccttcacctcccaaatccccaagggttcctcatgtgttttcaccaaaaccaccccagtgcctgagattgaaaatattgtaactttcagttagaaatcagccacaataaacaacatgggaaaatgccttaggatggagtttgcaaggtttccttgcccattatcagaaggaaaaagagcagaattttcttctcgtttaaccccactcacttccatcttgactgggtgacaagtggtaatgacacagatttgtagcgtgaaagactgaatacagtgtttggccaaaaatttttttaaaaatcatattatatgtttcaattgatctgttagaataaccaagaaaacaaaatgctggagtttctctataaatgacacttttatatcttctttattcgtcgttaaaacgcggtaggaaattaccctgaaatgtcgccttgcaattatttcactgaagatattccaatttccatactatttcctccaatagacccttgttgcct

SEQ ID NO: 4172 - protein, 1009 aa, Homosapiens
MVGEGPYLISDLDQRGRRRSFAERYDPSLKTMIPVRPCARLAPNPVDDAGLLSFATFSWLTPVMVKGYRQRLTVDTLPPLSTYDSSDTNAKRFRVLWDEEVARVGPEKASLSHVVWKFQRTRVLMDIVANILCIIMAAIGPTVLIHQILQQTERTSGKVWVGIGLCIALFATEFTKVFFWALAWAINYRTAIRLKVALSTLVFENLVSFKTLTHISVGEVLNILSSDSYSLFEAALFCPLPATIPILMVFCAAYAFFILGPTALIGISVYVIFIPVQMFMAKLNSAFRRSAILVTDKRVQTMNEFLTCIRLIKMYAWEKSFTNTIQDIRRRERKLLEKAGFVQSGNSALAPIVSTIAIVLTLSCHILLRRKLTAPVAFSVIAMFNVMKFSIAILPFSIKAMAEANVSLRRMKKILIDKSPPSYITQPEDPDTVLLLANATLTWEHEASRKSTPKKLQNQKRHLCKKQRSEAYSERSPPAKGATGPEEQSDSLKSVLHSISFVVRKGKILGICGNVGSGKSSLLAALLGQMQLQKGVVAVNGTLAYVSQQAWIFHGNVRENILFGEKYDHQRYQHTVRVCGLQKDLSNLPYGDLTEIGERGLNLSGGQRQRISLARAVYSDRQLYLLDDPLSAVDAHVGKHVFEECIKKTLRGKTVVLVTHQLQFLESCDEVILLEDGEICEKGTHKELMEERGRYAKLIHNLRGLQFKDPEHLYNAAMVEAFKESPAEREEDAVLAPGNEKDEGKESETGSEFVDTKVPEHQLIQTESPQEGTVTWKTYHTYIKASGGYLLSLFTVFLFLLMIGSAAFSNWWLGLWLDKGSRMTCGPQGNRTMCEVGAVLADIGQHVYQWVYTASMVFMLVFGVTKGFVFTKTTLMASSSLHDTVFDKILKSPMSFFDTTPTGRLMNRFSKDMDELDVRLPFHAENFLQQFFMVVFILVILAAVFPAVLLVVASLAVGFFILLRIFHRGVQELKKVENVSRSPWFTHITSSMQGLGIIHAYGKKESCIT

SEQ ID NO: 4173 - DNA, 5110 bp, Homosapiens
gccttggtcattggaccggctcccaaccaaaaccacaccatagggttttctgctcttggccaacccaacatgagaaaagaggaattaaatggtcctactaataagaaagcctcagcgtagcattaagggacgtagcaggtcttctggccacactcccctacaaatgtggaaagctcattggtgaaaacagttctcaggggtcaaagcaaaggaactgatctgggtaaagtagaggctgcctgatcccaatcagacatcctcacctctcaataacctttgccatttctctgccatagagtgaaagtgtccccaggccaaaagcccagggctccaggctgccatcaggatggtgggtgaaggaccctaccttatctcagatctggaccagcgaggccggcggagatcctttgcagaaagatatgaccccagcctgaagaccatgatcccagtgcgaccctgtgcaaggttagcacccaacccggtggatgatgccgggctactctccttcgccacattttcctggctcacgccggtgatggtgaaaggctaccggcaaaggctgaccgtagacaccctgcccccattgtcgacatatgactcatctgacaccaatgccaaaagatttcgagtcctttgggatgaagaggtagcaagggtgggtcctgagaaggcctctctgagccacgtggtgtggaaattccagaggacacgcgtgttgatggacatcgtggccaacatcctgtgcatcatcatggcagccatagggccgacagttctcattcaccaaatcctccagcagactgagaggacctctgggaaagtctgggttggcattggactgtgcatagccctttttgccaccgagtttaccaaagtcttcttttgggcccttgcctgggccatcaactaccgcacggccatccggttgaaggtggcgctctccaccttggtttttgaaaacctagtgtccttcaagacattgacccacatctctgttggcgaggtgctcaatatactgtcaagtgatagctattctttgtttgaagctgccttgttttgtcctttgccagccaccatcccgatcctaatggtcttttgtgcggcgtacgcctttttcattctggggcccacagctctcatcgggatatcagtgtatgtcatattcatacccgtccagatgtttatggccaagctcaattcagctttccgaaggtcagcaattttggtgacagacaagcgagttcagacaatgaatgagtttctgacctgcatcaggctgatcaaaatgtatgcctgggagaaatcttttaccaacactatccaagatataagaaggagggaaagaaaattactggaaaaagctggatttgtccaaagtggaaactctgccctggcccccatcgtgtccaccatagccatcgtgctgacattatcctgccacatcctcctgagacgcaaactcaccgcacccgtggcatttagtgtgattgccatgtttaatgtaatgaagttttccattgcaatcttgcccttctccatcaaagcaatggctgaagcgaatgtctctctaaggagaatgaagaaaattctcatagataaaagccccccatcttacatcacccaaccagaagacccagatactgtcttgcttttagcaaatgccaccttgacatgggagcatgaagccagcaggaaaagtaccccaaagaaattgcagaaccagaaaaggcatttatgcaagaaacagaggtcagaggcatacagtgagaggagtccaccagccaagggagccactggcccagaggagcaaagtgacagcctcaaatcggttctgcacagcataagctttgtggtgagaaaggggaagatcttgggaatatgtgggaatgtgggaagtggaaagagctccctccttgcagctctcctaggacagatgcagctgcagaaaggggtggtggcagtcaatggaactttggcctacgtttcacagcaggcatggatctttcatggaaatgtgagagaaaacatactctttggagaaaagtatgatcaccaaaggtatcagcacacagtccgcgtctgtggcctccagaaggacctgagcaacctcccctatggagacctgactgagattggggagcggggcctcaacctctctggggggcagaggcagaggattagcctggcccgcgctgtctactccgaccgtcagctctacctgctggacgaccccctgtcggccgtggacgcccacgtggggaagcacgtctttgaggagtgcattaagaagacgctcaggggaaagacagtcgtcctggtgacccaccagctacagttcttagagtcttgtgatgaagttattttattagaagatggagagatttgtgaaaagggaacccacaaggagttaatggaggagagagggcgctatgcaaaactgattcacaacctgcgaggattgcagttcaaggatcctgaacacctttacaatgcagcaatggtggaagccttcaaggagagccctgctgagagagaggaagatgctgttttggctccaggaaatgagaaagatgaaggaaaagaatctgaaacaggctcagaatttgtagacacaaaagttcctgagcaccagctcatccagactgaatccccccaggaaggaaccgtgacctggaaaacatatcacacgtacattaaggcttctggagggtacctcctttctctcttcactgtgttcctcttcctcctgatgattggcagcgctgccttcagcaactggtggctgggtctctggttggacaagggctcacggatgacctgtgggccccagggcaacaggaccatgtgtgaggtcggcgcggtgctggcagacatcggtcagcatgtgtaccagtgggtgtacactgcaagcatggtgttcatgctggtgtttggcgtcaccaaaggcttcgtcttcaccaagaccacactgatggcatcctcctctctgcatgacacggtgtttgataagatcttaaagagcccaatgagtttctttgacacgactcccactggcaggctaatgaaccgtttttccaaggatatggacgagctggatgtgaggctgccgtttcacgcagagaactttctgcagcagttttttatggtggtgtttattctcgtgatcttggctgctgtgtttcctgctgtccttttagtcgtggccagccttgctgtaggcttcttcattctgttacgcattttccacagaggagtccaggagctcaagaaggtggagaatgtcagccggtcaccctggttcacccacatcacctcctccatgcagggcctgggcatcattcacgcctatggcaagaaggagagctgcatcacctagtttaagacgctaaacgacgaaaactccagtcacctcctctactttaactgtgctctcaggtggtttgcgctgagaatggatgtcctcatgaacatccttaccttcactgtggccttgttggtgaccctgagtttctcctccatcagtacttcatccaaaggcctgtcattgtcatacatcatccagctgagcggactgctccaagtgtgtgtgcgaacgggaacagagacgcaagccaaattcacctccgtggagctgctcagggaatacatttcgacctgtgttcctgaatgcactcatcccctcaaagtggggacctgtcccaaggactggcccagccgtggggagatcaccttcagagactatcagatgagatacagagacaacaccccccttgttctcgacagcctgaacttgaacatacaaagtgggcagacagtcgggattgttggaagaacaggttccggaaagtcatcgttaggaatggctttgtttcgtctggtggagccagccagtggcacaatctttattgatgaggtggatatctgcattctcagcttggaagacctcagaaccaagctgactgtgatcccacaggatcctgtcctgtttgtaggtacagtaagataatgaaactcccagaaaaattacaggcagaagtcacagaaaatggagaaaacttctcagtaggggaacgtcagctgctttgtgtggcccgagctcttctccgtaattcaaagatcattctccttgatgaagccaccgcctctatggactccaagactgacaccctggttcagaacaccatcaaagatgccttcaagggctgcactgtgctgaccatcgcccaccgcctcaacacagttctcaactgcgatcacgtcctggttatggaaaatgggaaggtgattgagtttgacaagcctgaagtccttgcagagaagccagattctgcatttgcgatgttactagcagcagaagtcagattgtagaggtcctggcggctgattctagaggaggaagaggctctgtgagatgaataggaggagtcttcaggaggaggggctgtcctctccgcaggcagccctggtcttcagcccctcccatccacggagtgagctggggctgaagttgtccccactgccatactcagtccatgtcaccccacttggtgggcttggggttggttctgggtggtgaaccggggcagacccagctaatggattaaaaaactgcccttcacctcccaaatccccaagggttcctcatgtgttttcaccaaaaccaccccagtgcctgagattgaaaatattgtaactttcagttagaaatcagccacaataaacaacatgggaaaatgccttaggatggagtttgcaaggtttccttgcccattatcagaaggaaaaagagcagaattttcttctcgtttaaccccactcacttccatcttgactgggtgacaagtggtaatgacacagatttgtagcgtgaaagactgaatacagtgtttggccaaaaatttttttaaaaatcatattatatgtttcaattgatctgttagaataaccaagaaaacaaaatgctggagtttctctataaatgacacttttatatcttctttattcgtcgttaaaacgcggtaggaaattaccctgaaatgtcgccttgcaattatttcactgaagatattccaatttccatactatttcctccaatagacccttgttgcct

SEQ ID NO: 4174 - protein, 1009 aa, Homosapiens; identical to SEQ ID NO: 4172

SEQ ID NO: 4175 - DNA, 4390 bp, Homosapiens
cattaagggacgtagcaggtcttctggccacactcccctacaaatgtggaaagctcattggtgaaaacagttctcaggggtcaaagcaaaggaactgatctgggtaaagtagaggctgcctgatcccaatcagacatcctcacctctcaataacctttgccatttctctgccatagagtgaaagtgtccccaggccaaaagcccagggctccaggctgccatcaggatggtgggtgaaggaccctaccttatctcagatctggaccagcgaggccggcggagatcctttgcagaaagatatgaccccagcctgaagaccatgatcccagtgcgaccctgtgcaaggttagcacccaacccggtggatgatgccgggctactctccttcgccacattttcctggctcacgccggtgatggtgaaaggctaccggcaaaggctgaccgtagacaccctgcccccattgtcgacatatgactcatctgacaccaatgccaaaagatttcgagtcctttgggatgaagaggtagcaagggtgggtcctgagaaggcctctctgagccacgtggtgtggaaattccagaggacacgcgtgttgatggacatcgtggccaacatcctgtgcatcatcatggcagccatagggccgacagttctcattcaccaaatcctccagcagactgagaggacctctgggaaagtctgggttggcattggactgtgcatagccctttttgccaccgagtttaccaaagtcttcttttgggcccttgcctgggccatcaactaccgcacggccatccggttgaaggtggcgctctccaccttggtttttgaaaacctagtgtccttcaagacattgacccacatctctgttggcgagatgtttatggccaagctcaattcagctttccgaaggtcagcaattttggtgacagacaagcgagttcagacaatgaatgagtttctgacctgcatcaggctgatcaaaatgtatgcctgggagaaatcttttaccaacactatccaagatataagaaggagggaaagaaaattactggaaaaagctggatttgtccaaagtggaaactctgccctggcccccatcgtgtccaccatagccatcgtgctgacattatcctgccacatcctcctgagacgcaaactcaccgcacccgtggcatttagtgtgattgccatgtttaatgtaatgaagttttccattgcaatcttgcccttctccatcaaagcaatggctgaagcgaatgtctctctaaggagaatgaagaaaattctcatagataaaagccccccatcttacatcacccaaccagaagacccagatactgtcttgcttttagcaaatgccaccttgacatgggagcatgaagccagcaggaaaagtaccccaaagaaattgcagaaccagaaaaggcatttatgcaagaaacagaggtcagaggcatacagtgagaggagtccaccagccaagggagccactggcccagaggagcaaagtgacagcctcaaatcggttctgcacagcataagctttgtggtgagaaaggggaagatcttgggaatatgtgggaatgtgggaagtggaaagagctccctccttgcagctctcctaggacagatgcagctgcagaaaggggtggtggcagtcaatggaactttggcctacgtttcacagcaggcatggatctttcatggaaatgtgagagaaaacatactctttggagaaaagtatgatcaccaaaggtatcagcacacagtccgcgtctgtggcctccagaaggacctgagcaacctcccctatggagacctgactgagattggggagcggggcctcaacctctctggggggcagaggcagaggattagcctggcccgcgctgtctactccgaccgtcagctctacctgctggacgaccccctgtcggccgtggacgcccacgtggggaagcacgtctttgaggagtgcattaagaagacgctcaggggaaagacagtcgtcctggtgacccaccagctacagttcttagagtcttgtgatgaagttattttattagaagatggagagatttgtgaaaagggaacccacaaggagttaatggaggagagagggcgctatgcaaaactgattcacaacctgcgaggattgcagttcaaggatcctgaacacctttacaatgcagcaatggtggaagccttcaaggagagccctgctgagagagaggaagatgctggtataatcgttcctgagcaccagctcatccagactgaatccccccaggaaggaaccgtgacctggaaaacatatcacacgtacattaaggcttctggagggtacctcctttctctcttcactgtgttcctcttcctcctgatgattggcagcgctgccttcagcaactggtggctgggtctctggttggacaagggctcacggatgacctgtgggccccagggcaacaggaccatgtgtgaggtcggcgcggtgctggcagacatcggtcagcatgtgtaccagtgggtgtacactgcaagcatggtgttcatgctggtgtttggcgtcaccaaaggcttcgtcttcaccaagaccacactgatggcatcctcctctctgcatgacacggtgtttgataagatcttaaagagcccaatgagtttctttgacacgactcccactggcaggctaatgaaccgtttttccaaggatatggacgagctggatgtgaggctgccgtttcacgcagagaactttctgcagcagttttttatggtggtgtttattctcgtgatcttggctgctgtgtttcctgctgtccttttagtcgtggccagccttgctgtaggcttcttcattctgttacgcattttccacagaggagtccaggagctcaagaaggtggagaatgtcagccggtcaccctggttcacccacatcacctcctccatgcagggcctgggcatcattcacgcctatggcaagaaggagagctgcatcacctagtttaagacgctaaacgacgaaaactccagtcacctcctctactttaactgtgctctcaggtggtttgcgctgagaatggatgtcctcatgaacatccttaccttcactgtggccttgttggtgaccctgagtttctcctccatcagtacttcatccaaaggcctgtcattgtcatacatcatccagctgagcggactgctccaagtgtgtgtgcgaacgggaacagagacgcaagccaaattcacctccgtggagctgctcagggaatacatttcgacctgtgttcctgaatgcactcatcccctcaaagtggggacctgtcccaaggactggcccagccgtggggagatcaccttcagagactatcagatgagatacagagacaacaccccccttgttctcgacagcctgaacttgaacatacaaagtgggcagacagtcgggattgttggaagaacaggttccggaaagtcatcgttaggaatggctttgtttcgtctggtggagccagccagtggcacaatctttattgatgaggtggatatctgcattctcagcttggaagacctcagaaccaagctgactgtgatcccacaggatcctgtcctgtttgtaggtacagtaagataatgaaactcccagaaaaattacaggcagaagtcacagaaaatggagaaaacttctcagtaggggaacgtcagctgctttgtgtggcccgagctcttctccgtaattcaaagatcattctccttgatgaagccaccgcctctatggactccaagactgacaccctggttcagaacaccatcaaagatgccttcaagggctgcactgtgctgaccatcgcccaccgcctcaacacagttctcaactgcgatcacgtcctggttatggaaaatgggaaggtgattgagtttgacaagcctgaagtccttgcagagaagccagattctgcatttgcgatgttactagcagcagaagtcagattgtagaggtcctggcggctgattctagaggaggaagaggctctgtgagatgaataggaggagtcttcaggaggaggggctgtcctctccgcaggcagccctggtcttcagcccctcccatccacggagtgagctggggctgaagttgtccccactgccatactcagtccatgtcaccccacttggtgggcttggggttggttctgggtggtgaaccggggcagacccagctaatggattaaaaaactgcccttcacctcccaaatccccaagggttcctcatgtgttttcaccaaaaccaccccagtgcctgagattgaaaatattgtaactttcagttagaaatcagccacaataaacaacatgggaaaatgccttaggatgg

SEQ ID NO: 4176 - protein, 930 aa, Homosapiens
MVGEGPYLISDLDQRGRRRSFAERYDPSLKTMIPVRPCARLAPNPVDDAGLLSFATFSWLTPVMVKGYRQRLTVDTLPPLSTYDSSDTNAKRFRVLWDEEVARVGPEKASLSHVVWKFQRTRVLMDIVANILCIIMAAIGPTVLIHQILQQTERTSGKVWVGIGLCIALFATEFTKVFFWALAWAINYRTAIRLKVALSTLVFENLVSFKTLTHISVGEMFMAKLNSAFRRSAILVTDKRVQTMNEFLTCIRLIKMYAWEKSFTNTIQDIRRRERKLLEKAGFVQSGNSALAPIVSTIAIVLTLSCHILLRRKLTAPVAFSVIAMFNVMKFSIAILPFSIKAMAEANVSLRRMKKILIDKSPPSYITQPEDPDTVLLLANATLTWEHEASRKSTPKKLQNQKRHLCKKQRSEAYSERSPPAKGATGPEEQSDSLKSVLHSISFVVRKGKILGICGNVGSGKSSLLAALLGQMQLQKGVVAVNGTLAYVSQQAWIFHGNVRENILFGEKYDHQRYQHTVRVCGLQKDLSNLPYGDLTEIGERGLNLSGGQRQRISLARAVYSDRQLYLLDDPLSAVDAHVGKHVFEECIKKTLRGKTVVLVTHQLQFLESCDEVILLEDGEICEKGTHKELMEERGRYAKLIHNLRGLQFKDPEHLYNAAMVEAFKESPAEREEDAGIIVPEHQLIQTESPQEGTVTWKTYHTYIKASGGYLLSLFTVFLFLLMIGSAAFSNWWLGLWLDKGSRMTCGPQGNRTMCEVGAVLADIGQHVYQWVYTASMVFMLVFGVTKGFVFTKTTLMASSSLHDTVFDKILKSPMSFFDTTPTGRLMNRFSKDMDELDVRLPFHAENFLQQFFMVVFILVILAAVFPAVLLVVASLAVGFFILLRIFHRGVQELKKVENVSRSPWFTHITSSMQGLGIIHAYGKKESCIT

SEQ ID NO: 4177 - DNA, 4825 bp, Homosapiens
ggtgggagtggcagttgaatggggcagttggagaggaggacttcaggcgggtgggacaagagaaactgaatctgaggtccttggggagaagcaggccctggagtcctgggcagcagatgccaggctctgagccccatgactgctgaccctcctcccctccctctcatcctcagcccagggctgccaaatttagcaaagtgccattccagctgcaatgcttccaagccgcctcagatcatcaaaacttcacatgccctggggagcactcaaggaaattaccttctagcaccaatttcctatgcgcgctgattactcaaacctggccagggaggcctggcctccagtgtttggcatctgggactcaggagcccttaagacaagctgatgacatcttgctgccagggtcccttaccattagaaaagggaaccaaaaaatagaagttatagagtgaaagtgtccccaggccaaaagcccagggctccaggctgccatcaggatggtgggtgaaggaccctaccttatctcagatctggaccagcgaggccggcggagatcctttgcagaaagatatgaccccagcctgaagaccatgatcccagtgcgaccctgtgcaaggttagcacccaacccggtggatgatgccgggctactctccttcgccacattttcctggctcacgccggtgatggtgaaaggctaccggcaaaggctgaccgtagacaccctgcccccattgtcgacatatgactcatctgacaccaatgccaaaagatttcgagtcctttgggatgaagaggtagcaagggtgggtcctgagaaggcctctctgagccacgtggtgtggaaattccagaggacacgcgtgttgatggacatcgtggccaacatcctgtgcatcatcatggcagccatagggccgacagttctcattcaccaaatcctccagcagactgagaggacctctgggaaagtctgggttggcattggactgtgcatagccctttttgccaccgagtttaccaaagtcttcttttgggcccttgcctgggccatcaactaccgcacggccatccggttgaaggtggcgctctccaccttggtttttgaaaacctagtgtccttcaagacattgacccacatctctgttggcgaggtgctcaatatactgtcaagtgatagctattctttgtttgaagctgccttgttttgtcctttgccagccaccatcccgatcctaatggtcttttgtgcggcgtacgcctttttcattctggggcccacagctctcatcgggatatcagtgtatgtcatattcatacccgtccagatgtttatggccaagctcaattcagctttccgaaggtcagcaattttggtgacagacaagcgagttcagacaatgaatgagtttctgacctgcatcaggctgatcaaaatgtatgcctgggagaaatcttttaccaacactatccaagatataagaaggagggaaagaaaattactggaaaaagctggatttgtccaaagtggaaactctgccctggcccccatcgtgtccaccatagccatcgtgctgacattatcctgccacatcctcctgagacgcaaactcaccgcacccgtggcatttagtgtgattgccatgtttaatgtaatgaagttttccattgcaatcttgcccttctccatcaaagcaatggctgaagcgaatgtctctctaaggagaatgaagaaaattctcatagataaaagccccccatcttacatcacccaaccagaagacccagatactgtcttgcttttagcaaatgccaccttgacatgggagcatgaagccagcaggaaaagtaccccaaagaaattgcagaaccagaaaaggcatttatgcaagaaacagaggtcagaggcatacagtgagaggagtccaccagccaagggagccactggcccagaggagcaaagtgacagcctcaaatcggttctgcacagcataagctttgtggtgagaaaggggaagatcttgggaatatgtgggaatgtgggaagtggaaagagctccctccttgcagctctcctaggacagatgcagctgcagaaaggggtggtggcagtcaatggaactttggcctacgtttcacagcaggcatggatctttcatggaaatgtgagagaaaacatactctttggagaaaagtatgatcaccaaagattggggagcggggcctcaacctctctggggggcagaggcagaggattagcctggcccgcgctgtctactccgaccgtcagctctacctgctggacgaccccctgtcggccgtggacgcccacgtggggaagcacgtctttgaggagtgcattaagaagacgctcaggggaaagacagtcgtcctggtgacccaccagctacagttcttagagtcttgtgatgaagttattttattagaagatggagagatttgtgaaaagggaacccacaaggagttaatggaggagagagggcgctatgcaaaactgattcacaacctgcgaggattgcagttcaaggatcctgaacacctttacaatgcagcaatggtggaagccttcaaggagagccctgctgagagagaggaagatgctgttttggctccaggaaatgagaaagatgaaggaaaagaatctgaaacaggctcagaatttgtagacacaaaagttcctgagcaccagctcatccagactgaatccccccaggaaggaaccgtgacctggaaaacatatcacacgtacattaaggcttctggagggtacctcctttctctcttcactgtgttcctcttcctcctgatgattggcagcgctgccttcagcaactggtggctgggtctctggttggacaagggctcacggatgacctgtgggccccagggcaacaggaccatgtgtgaggtcggcgcggtgctggcagacatcggtcagcatgtgtaccagtgggtgtacactgcaagcatggtgttcatgctggtgtttggcgtcaccaaaggcttcgtcttcaccaagaccacactgatggcatcctcctctctgcatgacacggtgtttgataagatcttaaagagcccaatgagtttctttgacacgactcccactggcaggctaatgaaccgtttttccaaggatatggacgagctggatgtgaggctgccgtttcacgcagagaactttctgcagcagttttttatggtggtgtttattctcgtgatcttggctgctgtgtttcctgctgtccttttagtcgtggccagccttgctgtaggcttcttcattctgttacgcattttccacagaggagtccaggagctcaagaaggtggagaatgtcagccggtcaccctggttcacccacatcacctcctccatgcagggcctgggcatcattcacgcctatggcaagaaggagagctgcatcacctagtttaagacgctaaacgacgaaaactccagtcacctcctctactttaactgtgctctcaggtggtttgcgctgagaatggatgtcctcatgaacatccttaccttcactgtggccttgttggtgaccctgagtttctcctccatcagtacttcatccaaaggcctgtcattgtcatacatcatccagctgagcggactgctccaagtgtgtgtgcgaacgggaacagagacgcaagccaaattcacctccgtggagctgctcagggaatacatttcgacctgtgttcctgaatgcactcatcccctcaaagtggggacctgtcccaaggactggcccagccgtggggagatcaccttcagagactatcagatgagatacagagacaacaccccccttgttctcgacagcctgaacttgaacatacaaagtgggcagacagtcgggattgttggaagaacaggttccggaaagtcatcgttaggaatggctttgtttcgtctggtggagccagccagtggcacaatctttattgatgaggtggatatctgcattctcagcttggaagacctcagaaccaagctgactgtgatcccacaggatcctgtcctgtttgtaggtacagtaagataatgaaactcccagaaaaattacaggcagaagtcacagaaaatggagaaaacttctcagtaggggaacgtcagctgctttgtgtggcccgagctcttctccgtaattcaaagatcattctccttgatgaagccaccgcctctatggactccaagactgacaccctggttcagaacaccatcaaagatgccttcaagggctgcactgtgctgaccatcgcccaccgcctcaacacagttctcaactgcgatcacgtcctggttatggaaaatgggaaggtgattgagtttgacaagcctgaagtccttgcagagaagccagattctgcatttgcgatgttactagcagcagaagtcagattgtagaggtcctggcggctgattctagaggaggaagaggctctgtgagatgaataggaggagtcttcaggaggaggggctgtcctctccgcaggcagccctggtcttcagcccctcccatccacggagtgagctggggctgaagttgtccccactgccatactcagtccatgtcaccccacttggtgggcttggggttggttctgggtggtgaaccggggcagacccagctaatggattaaaaaactgcccttcacctcccaaatccccaagggttcctcatgtgttttcaccaaaaccaccccagtgcctgagattgaaaatattgtaactttcagttagaaatcagccacaataaacaacatgggaaaatgccttaggatgg

SEQ ID NO: 4178 - protein, 633 aa, Homosapiens
MVGEGPYLISDLDQRGRRRSFAERYDPSLKTMIPVRPCARLAPNPVDDAGLLSFATFSWLTPVMVKGYRQRLTVDTLPPLSTYDSSDTNAKRFRVLWDEEVARVGPEKASLSHVVWKFQRTRVLMDIVANILCIIMAAIGPTVLIHQILQQTERTSGKVWVGIGLCIALFATEFTKVFFWALAWAINYRTAIRLKVALSTLVFENLVSFKTLTHISVGEVLNILSSDSYSLFEAALFCPLPATIPILMVFCAAYAFFILGPTALIGISVYVIFIPVQMFMAKLNSAFRRSAILVTDKRVQTMNEFLTCIRLIKMYAWEKSFTNTIQDIRRRERKLLEKAGFVQSGNSALAPIVSTIAIVLTLSCHILLRRKLTAPVAFSVIAMFNVMKFSIAILPFSIKAMAEANVSLRRMKKILIDKSPPSYITQPEDPDTVLLLANATLTWEHEASRKSTPKKLQNQKRHLCKKQRSEAYSERSPPAKGATGPEEQSDSLKSVLHSISFVVRKGKILGICGNVGSGKSSLLAALLGQMQLQKGVVAVNGTLAYVSQQAWIFHGNVRENILFGEKYDHQRLGSGASTSLGGRGRGLAWPALSTPTVSSTCWTTPCRPWTPTWGSTSLRSALRRRSGERQSSW

SEQ ID NO: 4179 - DNA, 353 bp, Homosapiens
cagttcttagagtcttgtgatgaagttattttattagaagatggagagatttgtgaaaagggaacccacaaggagttaatggaggagagagggcgctatgcaaaactgattcacaacctgcgaggattgcagttcaaggatcctgaacacctttacaatgcagcaatggtggaagccttcaaggagagccctgctgagagagaggaagatgctggtataatcggttagaatcccatccctgttattgtccttggcttgaatggacacagatctctctttatttctcaccctagttttggctccaggaaatgagaaagatgaaggaaaagaatctgaaacaggctcagaatttg

SEQ ID NO: 4180 - protein, 49 aa, Homosapiens
MEERGRYAKLIHNLRGLQFKDPEHLYNAAMVEAFKESPAEREEDAGIIG

SEQ ID NO: 4181 - DNA, 283 bp, Homosapiens
ctcaaatcggttctgcacagcataagctttgtggtgagaaaggggaagatcttgggaatatgtgggaatgtgggaagtggaaagagctccctccttgcagctctcctaggacagatgcagctgcagaaaggggtggtggcagtcaatggaactttggcctacgtttcacagcaggcatggatctttcatggaaatgtgagagaaaacatactctttggagaaaagtatgatcaccaaagtacccaataggaagctgttcatccgtgcgccctctcatcctcca

SEQ ID NO: 4182 - protein, 56 aa, Homosapiens
MWECGKWKELPPCSSPRTDAAAERGGGSQWNFGLRFTAGMDLSWKCERKHTLWRKV

SEQ ID NO: 4183 - DNA, 2391 bp, Homosapiens
agttggagaggaggacttcaggcgggtgggacaagagaaactgaatctgaggtccttggggagaagcaggccctggagtcctgggcagcagatgccaggctctgagccccatgactgctgaccctcctcccctccctctcatcctcagcccagagtgaaagtgtccccaggccaaaagcccagggctccaggctgccatcaggatggtgggtgaaggaccctaccttatctcagatctggaccagcgaggccggcggagatcctttgcagaaagatatgaccccagcctgaagaccatgatcccagtgcgaccctgtgcaaggttagcacccaacccggtggatgatgccgggctactctccttcgccacattttcctggctcacgccggtgatggtgaaaggctaccggcaaaggctgaccgtagacaccctgcccccattgtcgacatatgactcatctgacaccaatgccaaaagatttcgagtcctttgggatgaagaggtagcaagggtgggtcctgagaaggcctctctgagccacgtggtgtggaaattccagaggacacgcgtgttgatggacatcgtggccaacatcctgtgcatcatcatggcagccatagggccgacagttctcattcaccaaatcctccagcagactgagaggacctctgggaaagtctgggttggcattggactgtgcatagccctttttgccaccgagtttaccaaagtcttcttttgggcccttgcctgggccatcaactaccgcacggccatccggttgaaggtggcgctctccaccttggtttttgaaaacctagtgtccttcaagacattgacccacatctctgttggcgaggtgctcaatatactgtcaagtgatagctattctttgtttgaagctgccttgttttgtcctttgccagccaccatcccgatcctaatggtcttttgtgcggcgtacgcctttttcattctggggcccacagctctcatcgggatatcagtgtatgtcatattcatacccgtccagatgtttatggccaagctcaattcagctttccgaaggtcagcaattttggtgacagacaagcgagttcagacaatgaatgagtttctgacctgcatcaggctgatcaaaatgtatgcctgggagaaatcttttaccaacactatccaagatataagaaggagggaaagaaaattactggaaaaagctggatttgtccaaagtggaaactctgccctggcccccatcgtgtccaccatagccatcgtgctgacattatcctgccacatcctcctgagacgcaaactcaccgcacccgtggcatttagtgtgattgccatgtttaatgtaatgaagttttccattgcaatcttgcccttctccatcaaagcaatggctgaagcgaatgtctctctaaggagaatgaagaaaattctcatagataaaagccccccatcttacatcacccaaccagaagacccagatactgtcttgcttttagcaaatgccaccttgacatgggagcatgaagccagcaggaaaagtaccccaaagaaattgcagaaccagaaaaggcatttatgcaagaaacagaggtcagaggcatacagtgagaggagtccaccagccaagggagccactggcccagaggagcaaagtgacagcctcaaatcggttctgcacagcataagctttgtggtgagaaaggggaagatcttgggaatatgtgggaatgtgggaagtggaaagagctccctccttgcagctctcctaggacagatgcagctgcagaaaggggtggtggcagtcaatggaactttggcctacgtttcacagcaggcatggatctttcatggaaatgtgagagaaaacatactctttggagaaaagtatgatcaccaaaggtaatattaacttttaaagcaggaggcacatttgtgtttggtacacactctcctacagatgctgatgctgttggtaatgactgctaagtgggttctgagtttaatgaattctgattaaacattcatcagatccacacagacactggttttcctcttcctgagccaagcgttcaggagaggcgacttctgcagacctgcgactgcacactgggaagaggatagaatcggcacttcattcccagggcagaggagcatatgttccgaggttctctgcaacagggcatatgtggtctgactagagaaaagtgaatccagcaattttgctttaggctgagtacccaaaactgctcagaatcatgagcaagtatgtaatgaatcagccctgacattattaattgacatcagagctatcaggatatattatcactgttagtgtcctcagaatggtctaactaaataaaaacaaagctcaactt

SEQ ID NO: 4184 - protein, 571 aa, Homosapiens
MVGEGPYLISDLDQRGRRRSFAERYDPSLKTMIPVRPCARLAPNPVDDAGLLSFATFSWLTPVMVKGYRQRLTVDTLPPLSTYDSSDTNAKRFRVLWDEEVARVGPEKASLSHVVWKFQRTRVLMDIVANILCIIMAAIGPTVLIHQILQQTERTSGKVWVGIGLCIALFATEFTKVFFWALAWAINYRTAIRLKVALSTLVFENLVSFKTLTHISVGEVLNILSSDSYSLFEAALFCPLPATIPILMVFCAAYAFFILGPTALIGISVYVIFIPVQMFMAKLNSAFRRSAILVTDKRVQTMNEFLTCIRLIKMYAWEKSFTNTIQDIRRRERKLLEKAGFVQSGNSALAPIVSTIAIVLTLSCHILLRRKLTAPVAFSVIAMFNVMKFSIAILPFSIKAMAEANVSLRRMKKILIDKSPPSYITQPEDPDTVLLLANATLTWEHEASRKSTPKKLQNQKRHLCKKQRSEAYSERSPPAKGATGPEEQSDSLKSVLHSISFVVRKGKILGICGNVGSGKSSLLAALLGQMQLQKGVVAVNGTLAYVSQQAWIFHGNVRENILFGEKYDHQR

SEQ ID NO: 4185 - DNA, 426 bp, Homosapiens
gctcagaggttcacacaggtgcagcttcgaggcccacagtctgcgaccttcttgtttggagatgagaacttctcctggaagcagggattatgatgtctgattttcaaaaaatgccataaaaaatcaatttagtaaaccaatatttctcactctcttgcctgcactggtgctggggatgaaatggtgtccctgccctcagggaatttggaatctcgtgaggaactgctgtgggacactgccctcatcacgggtgagggagctctctacacactggccctccccaggccagatgcagctgccgtcttttccttgagcgaccagcagatggcagcctcgtcccaaaaatgcggtgatggccccactgggcttctgagctggccggatccccggagataattcgccacaaaagtgttgacccctggagtc

SEQ ID NO: 4186 - protein, 71 aa, Homosapiens
MVSLPSGNLESREELLWDTALITGEGALYTLALPRPDAAAVFSLSDQQMAASSQKCGDGPTGLLSWPDPRR

SEQ ID NO: 4187 - DNA, 1814 bp, Homosapiens
caataggccggcttttgaactgcttcgcaggggacttggaacagctggaccagctcttgcccatcttttcagagcagttcctggtcctgtccttaatggtgatcgccgtcctgttgattgtcagtgtgctgtctccatatatcctgttaatgggagccataatcatggttatttgcttcatttattatatgatgttcaagaaggccatcggtgtgttcaagagactggagaactatagccggtctcctttattctcccacatcctcaattctctgcaaggcctgagctccatccatgtctatggaaaaactgaagacttcatcagccagtttaagaggctgactgatgcgcagaataactacctgctgttgtttctatcttccacacgatggatggcattgaggctggagatcatgaccaaccttgtgaccttggctgttgccctgttcgtggcttttggcatttcctccaccccctactcctttaaagtcatggctgtcaacatcgtgctgcagctggcgtccagcttccaggccactgcccggattggcttggagacagaggcacagttcacggctgtagagaggatactgcagtacatgaagatgtgtgtctcggaagctcctttacacatggaaggcacaagttgtccccaggggtggccacagcatggggaaatcatatttcaggattatcacatgaaatacagagacaacacacccaccgtgcttcacggcatcaacctgaccatccgcggccacgaagtggtgggcatcgtgggaaggacgggctctgtaggtttttactgagcacctactatgtgcctgggaaccgaaagggaagtcctccttgggcatggctctcttccgcctggtggagcccatggcaggccggattctcattgacggcgtggacatttgcagcatcggcctggaggacttgcggtccaagctctcagtgatccctcaagatccagtgctgctctcaggaaccatcagattcaacctagatccctttgaccgtcacactgaccagcagatctgggatgccttggagaggacattcctgaccaaggccatctcaaagttccccaaaaagctgcatacagatgtggtggaaaacggtggaaacttctctgtgggggagaggcagctgctctgcattgccagggctgtgcttcgcaactccaagatcatccttatcgatgaagccacagcctccattgacatggagacagacaccctgatccagcgcacaatccgtgaagccttccagggctgcaccgtgctcgtcattgcccaccgtgtcaccactgtgctgaactgtgaccacatcctggttatgggcaatgggaaggtggtagaatttgatcggccggaggtactgcggaagaagcctgggtcattgttcgcagccctcatggccacagccacttcttcactgagataaggagatgtggagacttcatggaggctggcagctgagctcagaggttcacacaggtgcagcttcgaggcccacagtctgcgaccttcttgtttggagatgagaacttctcctggaagcaggggtaaatgtagggggggtggggattgctggatggaaaccctggaataggctacttgatggctctcaagaccttagaaccccagaaccatctaagacatgggattcagtgatcatgtggttctccttttaacttacatgctgaataattttataataaggtaaaagcttatagttttctgatctgtgttagaagtgttgcaaatgctgtactgactttgtaaaatataaaactaaggaaaactcac

SEQ ID NO: 4188 - protein, 237 aa, Homosapiens
MVIAVLLIVSVLSPYILLMGAIIMVICFIYYMMFKKAIGVFKRLENYSRSPLFSHILNSLQGLSSIHVYGKTEDFISQFKRLTDAQNNYLLLFLSSTRWMALRLEIMTNLVTLAVALFVAFGISSTPYSFKVMAVNIVLQLASSFQATARIGLETEAQFTAVERILQYMKMCVSEAPLHMEGTSCPQGWPQHGEIIFQDYHMKYRDNTPTVLHGINLTIRGHEVVGIVGRTGSVGFY

SEQ ID NO: 4189 - DNA, 4864 bp, Homosapiens
actgggataaagcaagaagactgattttatgagcaggggtttgatacatcaaaggagattgcccaggatcaagggtgcggtgttgggggtgggttggggagggtggttagagaaggtttcactaagtgatttgggcctgaggcctgagaagatgtttaaaaagagggatcaagcacaggctaaggagaggaaagagcaggcacccaaacctctgcatggccccaatatgctccctgcagggtagtgccccctcttctggctgctcaaggcgagatctaagcttcttctaactcctgctgtcttttcatattctctgattctgggaaacgaagaattggcaggaactgaaaatgactaggaagaggacatactgggtgcccaactcttctggtggcctcgtgaatcgtggcatcgacataggcgatgacatggtttcaggacttatttataaaacctatactctccaagatggcccctggagtcagcaagagagaaatcctgaggctccagggagggcagctgtcccaccgtgggggaagtatgatgctgccttgagaaccatgattcccttccgtcccaagccgaggtttcctgccccccagcccctggacaatgctggcctgttctcctacctcaccgtgtcatggctcaccccgctcatgatccaaagcttacggagtcgcttagatgagaacaccatccctccactgtcagtccatgatgcctcagacaaaaatgtccaaaggcttcaccgcctttgggaagaagaagtctcaaggcgagggattgaaaaagcttcagtgcttctggtgatgctgaggttccagagaacaaggttgattttcgatgcacttctgggcatctgcttctgcattgccagtgtactcgggccaatattgattataccaaagatcctggaatattcagaagagcagttggggaatgttgtccatggagtgggactctgctttgccctttttctctccgaatgtgtgaagtctctgagtttctcctccagttggatcatcaaccaacgcacagccatcaggttccgagcagctgtttcctcctttgcctttgagaagctcatccaatttaagtctgtaatacacatcacctcaggagaggccatcagcttcttcaccggtgatgtaaactacctgtttgaaggggtgtgctatggacccctagtactgatcacctgcgcatcgctggtcatctgcagcatttcttcctacttcattattggatacactgcatttattgccatcttatgctatctcctggttttcccactggcggtattcatgacaagaatggctgtgaaggctcagcatcacacatctgaggtcagcgaccagcgcatccgtgtgaccagtgaagttctcacttgcattaagctgattaaaatgtacacatgggagaaaccatttgcaaaaatcattgaagacctaagaaggaaggaaaggaaactattggagaagtgcgggcttgtccagagcctgacaagtataaccttgttcatcatccccacagtggccacagcggtctgggttctcatccacacatccttaaagctgaaactcacagcgtcaatggccttcagcatgctggcctccttgaatctccttcggctgtcagtgttctttgtgcctattgcagtcaaaggtctcacgaattccaagtctgcagtgatgaggttcaagaagtttttcctccaggagagccctgttttctatgtccagacattacaagaccccagcaaagctctggtctttgaggaggccaccttgtcatggcaacagacctgtcccgggatcgtcaatggggcactggagctggagaggaacgggcatgcttctgaggggatgaccaggcctagagatgccctcgggccagaggaagaagggaacagcctgggcccagagttgcacaagatcaacctggtggtgtccaaggggatgatgttaggggtctgcggcaacacggggagtggtaagagcagcctgttgtcagccatcctggaggagatgcacttgctcgagggctcggtgggggtgcagggaagcctggcctatgtcccccagcaggcctggatcgtcagcgggaacatcagggagaacatcctcatgggaggcgcatatgacaaggcccgatacctccaggtgctccactgctgctccctgaatcgggacctggaacttctgccctttggagacatgacagagattggagagcggggcctcaacctctctggggggcagaaacagaggatcagcctggcccgcgccgtctattccgaccgtcagatctacctgctggacgaccccctgtctgctgtggacgcccacgtggggaagcacatttttgaggagtgcattaagaagacactcagggggaagacggtcgtcctggtgacccaccagctgcagtacttagaattttgtggccagatcattttgttggaaaatgggaaaatctgtgaaaatggaactcacagtgagttaatgcagaaaaaggggaaatatgcccaacttatccagaagatgcacaaggaagccacttcggacatgttgcaggacacagcaaagatagcagagaagccaaaggtagaaagtcaggctctggccacctccctggaagagtctctcaacggaaatgctgtgccggagcatcagctcacacaggaggaggagatggaagaaggctccttgagttggagggtctaccaccactacatccaggcagctggaggttacatggtctcttgcataattttcttcttcgtggtgctgatcgtcttcttaacgatcttcagcttctggtggctgagctactggttggagcagggctcggggaccaatagcagccgagagagcaatggaaccatggcagacctgggcaacattgcagacaatcctcaactgtccttctaccagctggtgtacgggctcaacgccctgctcctcatctgtgtgggggtctgctcctcagggattttcaccaaggtcacgaggaaggcatccacggccctgcacaacaagctcttcaacaaggttttccgctgccccatgagtttctttgacaccatcccaataggccggcttttgaactgcttcgcaggggacttggaacagctggaccagctcttgcccatcttttcagagcagttcctggtcctgtccttaatggtgatcgccgtcctgttgattgtcagtgtgctgtctccatatatcctgttaatgggagccataatcatggttatttgcttcatttattatatgatgttcaagaaggccatcggtgtgttcaagagactggagaactatagccggtctcctttattctcccacatcctcaattctctgcaaggcctgagctccatccatgtctatggaaaaactgaagacttcatcagccagtttaagaggctgactgatgcgcagaataactacctgctgttgtttctatcttccacacgatggatggcattgaggctggagatcatgaccaaccttgtgaccttggctgttgccctgttcgtggcttttggcatttcctccaccccctactcctttaaagtcatggctgtcaacatcgtgctgcagctggcgtccagcttccaggccactgcccggattggcttggagacagaggcacagttcacggctgtagagaggatactgcagtacatgaagatgtgtgtctcggaagctcctttacacatggaaggcacaagttgtccccaggggtggccacagcatggggaaatcatatttcaggattatcacatgaaatacagagacaacacacccaccgtgcttcacggcatcaacctgaccatccgcggccacgaagtggtgggcatcgtgggaaggacgggctctgggaagtcctccttgggcatggctctcttccgcctggtggagcccatggcaggccggattctcattgacggcgtggacatttgcagcatcggcctggaggacttgcggtccaagctctcagtgatccctcaagatccagtgctgctctcaggaaccatcagattcaacctagatccctttgaccgtcacactgaccagcagatctgggatgccttggagaggacattcctgaccaaggccatctcaaagttccccaaaaagctgcatacagatgtggtggaaaacggtggaaacttctctgtgggggagaggcagctgctctgcattgccagggctgtgcttcgcaactccaagatcatccttatcgatgaagccacagcctccattgacatggagacagacaccctgatccagcgcacaatccgtgaagccttccagggctgcaccgtgctcgtcattgcccaccgtgtcaccactgtgctgaactgtgaccacatcctggttatgggcaatgggaaggtggtagaatttgatcggccggaggtactgcggaagaagcctgggtcattgttcgcagccctcatggccacagccacttcttcactgagataaggagatgtggagacttcatggaggctggcagctgagctcagaggttcacacaggtgcagcttcgaggcccacagtctgcgaccttcttgtttggagatgagaacttctcctggaagcaggggtaaatgtagggggggtggggattgctggatggaaaccctggaataggctacttgatggctctcaagaccttagaaccccagaaccatctaagacatgggattcagtgatcatgtggttctccttttaacttacatgctgaataattttataataaggtaaaagcttatagttttctgatctgtgttagaagtgttgcaaatgctgtactgactttgtaaaatataaaactaaggaaaactcac

SEQ ID NO: 4190 - protein, 1382 aa, Homosapiens; identical to SEQ ID NO: 594

SEQ ID NO: 4191 - DNA, 4579 bp, Homosapiens
ggtgtatttgaataaaccaggttggcaaatcatactatagctgaaagaattggcaggaactgaaaatgactaggaagaggacatactgggtgcccaactcttctggtggcctcgtgaatcgtggcatcgacataggcgatgacatggtttcaggacttatttataaaacctatactctccaagatggcccctggagtcagcaagagagaaatcctgaggctccagggagggcagctgtcccaccgtgggggaagtatgatgctgccttgagaaccatgattcccttccgtcccaagccgaggtttcctgccccccagcccctggacaatgctggcctgttctcctacctcaccgtgtcatggctcaccccgctcatgatccaaagcttacggagtcgcttagatgagaacaccatccctccactgtcagtccatgatgcctcagacaaaaatgtccaaaggcttcaccgcctttgggaagaagaagtctcaaggcgagggattgaaaaagcttcagtgcttctggtgatgctgaggttccagagaacaaggttgattttcgatgcacttctgggcatctgcttctgcattgccagtgtactcgggccaatattgattataccaaagatcctggaatattcagaagagcagttggggaatgttgtccatggagtgggactctgctttgccctttttctctccgaatgtgtgaagtctctgagtttctcctccagttggatcatcaaccaacgcacagccatcaggttccgagcagctgtttcctcctttgcctttgagaagctcatccaatttaagtctgtaatacacatcacctcaggagaggccatcagcttcttcaccggtgatgtaaactacctgtttgaaggggtgtgctatggacccctagtactgatcacctgcgcatcgctggtcatctgcagcatttcttcctacttcattattggatacactgcatttattgccatcttatgctatctcctggttttcccactggcggtattcatgacaagaatggctgtgaaggctcagcatcacacatctgaggtcagcgaccagcgcatccgtgtgaccagtgaagttctcacttgcattaagctgattaaaatgtacacatgggagaaaccatttgcaaaaatcattgaagacctaagaaggaaggaaaggaaactattggagaagtgcgggcttgtccagagcctgacaagtataaccttgttcatcatccccacagtggccacagcggtctgggttctcatccacacatccttaaagctgaaactcacagcgtcaatggccttcagcatgctggcctccttgaatctccttcggctgtcagtgttctttgtgcctattgcagtcaaaggtctcacgaattccaagtctgcagtgatgaggttcaagaagtttttcctccaggagagccctgttttctatgtccagacattacaagaccccagcaaagctctggtctttgaggaggccaccttgtcatggcaacagacctgtcccgggatcgtcaatggggcactggagctggagaggaacgggcatgcttctgaggggatgaccaggcctagagatgccctcgggccagaggaagaagggaacagcctgggcccagagttgcacaagatcaacctggtggtgtccaaggggatgatgttaggggtctgcggcaacacggggagtggtaagagcagcctgttgtcagccatcctggaggagatgcacttgctcgagggctcggtgggggtgcagggaagcctggcctatgtcccccagcaggcctggatcgtcagcgggaacatcagggagaacatcctcatgggaggcgcatatgacaaggcccgatacctccaggtgctccactgctgctccctgaatcgggacctggaacttctgccctttggagacatgacagagattggagagcggggcctcaacctctctggggggcagaaacagaggatcagcctggcccgcgccgtctattccgaccgtcagatctacctgctggacgaccccctgtctgctgtggacgcccacgtggggaagcacatttttgaggagtgcattaagaagacactcagggggaagacggtcgtcctggtgacccaccagctgcagtacttagaattttgtggccagatcattttgttggaaaatgggaaaatctgtgaaaatggaactcacagtgagttaatgcagaaaaaggggaaatatgcccaacttatccagaagatgcacaaggaagccacttcggacatgttgcaggacacagcaaagatagcagagaagccaaaggtagaaagtcaggctctggccacctccctggaagagtctctcaacggaaatgctgtgccggagcatcagctcacacaggaggaggagatggaagaaggctccttgagttggagggtctaccaccactacatccaggcagctggaggttacatggtctcttgcataattttcttcttcgtggtgctgatcgtcttcttaacgatcttcagcttctggtggctgagctactggttggagcagggctcggggaccaatagcagccgagagagcaatggaaccatggcagacctgggcaacattgcagacaatcctcaactgtccttctaccagctggtgtacgggctcaacgccctgctcctcatctgtgtgggggtctgctcctcagggattttcaccaaggtcacgaggaaggcatccacggccctgcacaacaagctcttcaacaaggttttccgctgccccatgagtttctttgacaccatcccaataggccggcttttgaactgcttcgcaggggacttggaacagctggaccagctcttgcccatcttttcagagcagttcctggtcctgtccttaatggtgatcgccgtcctgttgattgtcagtgtgctgtctccatatatcctgttaatgggagccataatcatggttatttgcttcatttattatatgatgttcaagaaggccatcggtgtgttcaagagactggagaactatagccggtctcctttattctcccacatcctcaattctctgcaaggcctgagctccatccatgtctatggaaaaactgaagacttcatcagccagtttaagaggctgactgatgcgcagaataactacctgctgttgtttctatcttccacacgatggatggcattgaggctggagatcatgaccaaccttgtgaccttggctgttgccctgttcgtggcttttggcatttcctccaccccctactcctttaaagtcatggctgtcaacatcgtgctgcagctggcgtccagcttccaggccactgcccggattggcttggagacagaggcacagttcacggctgtagagaggatactgcagtacatgaagatgtgtgtctcggaagctcctttacacatggaaggcacaagttgtccccaggggtggccacagcatggggaaatcatatttcaggattatcacatgaaatacagagacaacacacccaccgtgcttcacggcatcaacctgaccatccgcggccacgaagtggtgggcatcgtgggaaggacgggctctgggaagtcctccttgggcatggctctcttccgcctggtggagcccatggcaggccggattctcattgacggcgtggacatttgcagcatcggcctggaggacttgcggtccaagctctcagtgatccctcaagatccagtgctgctctcaggaaccatcagattcaacctagatccctttgaccgtcacactgaccagcagatctgggatgccttggagaggacattcctgaccaaggccatctcaaagttccccaaaaagctgcatacagatgtggtggaaaacggtggaaacttctctgtgggggagaggcagctgctctgcattgccagggctgtgcttcgcaactccaagatcatccttatcgatgaagccacagcctccattgacatggagacagacaccctgatccagcgcacaatccgtgaagccttccagggctgcaccgtgctcgtcattgcccaccgtgtcaccactgtgctgaactgtgaccacatcctggttatgggcaatgggaaggtggtagaatttgatcggccggaggtactgcggaagaagcctgggtcattgttcgcagccctcatggccacagccacttcttcactgagataaggagatgtggagacttcatggaggctggcagctgagctcagaggttcacacaggtgcagcttcgaggcccacagtctgcgaccttcttgtttggagatgagaacttctcctggaagcaggggtaaatgtagggggggtggggattgctggatggaaaccctggaataggctacttgatggctctcaagaccttagaaccccagaaccatctaagacatgggattcagtgatcatgtggttctccttttaacttacatgctgaataattttataataaggtaaaagcttatagttttctgatctgtgttagaagtgttgcaaatgctgtactgactttgtaaaatataaaactaaggaaaactcac

SEQ ID NO: 4192 - protein, 1382 aa, Homosapiens; identical to SEQ ID NO: 594

SEQ ID NO: 4193 - DNA, 4465 bp, Homosapiens
ggtgtatttgaataaaccaggttggcaaatcatactatagctgaaagaattggcaggaactgaaaatgactaggaagaggacatactgggtgcccaactcttctggtggcctcgtgaatcgtggcatcgacataggcgatgacatggtttcaggacttatttataaaacctatactctccaagatggcccctggagtcagcaagagagaaatcctgaggctccagggagggcagctgtcccaccgtgggggaagtatgatgctgccttgagaaccatgattcccttccgtcccaagccgaggtttcctgccccccagcccctggacaatgctggcctgttctcctacctcaccgtgtcatggctcaccccgctcatgatccaaagcttacggagtcgcttagatgagaacaccatccctccactgtcagtccatgatgcctcagacaaaaatgtccaaaggcttcaccgcctttgggaagaagaagtctcaaggcgagggattgaaaaagcttcagtgcttctggtgatgctgaggttccagagaacaaggttgattttcgatgcacttctgggcatctgcttctgcattgccagtgtactcgggccaatattgattataccaaagatcctggaatattcagaagagcagttggggaatgttgtccatggagtgggactctgctttgccctttttctctccgaatgtgtgaagtctctgagtttctcctccagttggatcatcaaccaacgcacagccatcaggttccgagcagctgtttcctcctttgcctttgagaagctcatccaatttaagtctgtaatacacatcacctcaggagaggccatcagcttcttcaccggtgatgtaaactacctgtttgaaggggtgtgctatggacccctagtactgatcacctgcgcatcgctggtcatctgcagcatttcttcctacttcattattggatacactgcatttattgccatcttatgctatctcctggttttcccactggcggtattcatgacaagaatggctgtgaaggctcagcatcacacatctgaggtcagcgaccagcgcatccgtgtgaccagtgaagttctcacttgcattaagctgattaaaatgtacacatgggagaaaccatttgcaaaaatcattgaagacctaagaaggaaggaaaggaaactattggagaagtgcgggcttgtccagagcctgacaagtataaccttgttcatcatccccacagtggccacagcggtctgggttctcatccacacatccttaaagctgaaactcacagcgtcaatggccttcagcatgctggcctccttgaatctccttcggctgtcagtgttctttgtgcctattgcagtcaaaggtctcacgaattccaagtctgcagtgatgaggttcaagaagtttttcctccaggagagccctgttttctatgtccagacattacaagaccccagcaaagctctggtctttgaggaggccaccttgtcatggcaacagacctgtcccgggatcgtcaatggggcactggagctggagaggaacgggcatgcttctgaggggatgaccaggcctagagatgccctcgggccagaggaagaagggaacagcctgggcccagagttgcacaagatcaacctggtggtgtccaaggggatgatgttaggggtctgcggcaacacggggagtggtaagagcagcctgttgtcagccatcctggaggagatgcacttgctcgagggctcggtgggggtgcagggaagcctggcctatgtcccccagcaggcctggatcgtcagcgggaacatcagggagaacatcctcatgggaggcgcatatgacaaggcccgatacctccaggtgctccactgctgctccctgaatcgggacctggaacttctgccctttggagacatgacagagattggagagcggggcctcaacctctctggggggcagaaacagaggatcagcctggcccgcgccgtctattccgaccgtcagatctacctgctggacgaccccctgtctgctgtggacgcccacgtggggaagcacatttttgaggagtgcattaagaagacactcagggggaagacggtcgtcctggtgacccaccagctgcagtacttagaattttgtggccagatcattttgttggaaaatgggaaaatctgtgaaaatggaactcacagtgagttaatgcagaaaaaggggaaatatgcccaacttatccagaagatgcacaaggaagccacttcggacatgttgcaggacacagcaaagatagcagagaagccaaaggtagaaagtcaggctctggccacctccctggaagagtctctcaacggaaatgctgtgccggagcatcagctcacacaggaggaggagatggaagaaggctccttgagttggagggtctaccaccactacatccaggcagctggaggttacatggtctcttgcataattttcttcttcgtggtgctgatcgtcttcttaacgatcttcagcttctggtggctgagctactggttggagcagggctcggggaccaatagcagccgagagagcaatggaaccatggcagacctgggcaacattgcagacaatcctcaactgtccttctaccagctggtgtacgggctcaacgccctgctcctcatctgtgtgggggtctgctcctcagggattttcaccaaggtcacgaggaaggcatccacggccctgcacaacaagctcttcaacaaggttttccgctgccccatgagtttctttgacaccatcccaataggccggcttttgaactgcttcgcaggggacttggaacagctggaccagctcttgcccatcttttcagagcagttcctggtcctgtccttaatggtgatcgccgtcctgttgattgtcagtgtgctgtctccatatatcctgttaatgggagccataatcatggttatttgcttcatttattatatgatgttcaagaaggccatcggtgtgttcaagagactggagaactatagccggtctcctttattctcccacatcctcaattctctgcaaggcctgagctccatccatgtctatggaaaaactgaagacttcatcagccagtttaagaggctgactgatgcgcagaataactacctgctgttgtttctatcttccacacgatggatggcattgaggctggagatcatgaccaaccttgtgaccttggctgttgccctgttcgtggcttttggcatttcctccaccccctactcctttaaagtcatggctgtcaacatcgtgctgcagctggcgtccagcttccaggccactgcccggattggcttggagacagaggcacagttcacggctgtagagaggatactgcagtacatgaagatgtgtgtctcggaagctcctttacacatggaaggcacaagttgtccccaggggtggccacagcatggggaaatcatatttcaggattatcacatgaaatacagagacaacacacccaccgtgcttcacggcatcaacctgaccatccgcggccacgaagtggtgggcatcgtgggaaggacgggctctgggaagtcctccttgggcatggctctcttccgcctggtggagcccatggcaggccggattctcattgacggcgtggacatttgcagcatcggcctggaggacttgcggtccaagctctcagtgatccctcaagatccagtgctgctctcaggaaccatcagattcaacctagatccctttgaccgtcacactgaccagcagatctgggatgccttggagaggacattcctgaccaaggccatcatccttatcgatgaagccacagcctccattgacatggagacagacaccctgatccagcgcacaatccgtgaagccttccagggctgcaccgtgctcgtcattgcccaccgtgtcaccactgtgctgaactgtgaccacatcctggttatgggcaatgggaaggtggtagaatttgatcggccggaggtactgcggaagaagcctgggtcattgttcgcagccctcatggccacagccacttcttcactgagataaggagatgtggagacttcatggaggctggcagctgagctcagaggttcacacaggtgcagcttcgaggcccacagtctgcgaccttcttgtttggagatgagaacttctcctggaagcaggggtaaatgtagggggggtggggattgctggatggaaaccctggaataggctacttgatggctctcaagaccttagaaccccagaaccatctaagacatgggattcagtgatcatgtggttctccttttaacttacatgctgaataattttataataaggtaaaagcttatagttttctgatctgtgttagaagtgttgcaaatgctgtactgactttgtaaaatataaaactaaggaaaactcac

SEQ ID NO: 4194 - protein, 1344 aa, Homosapiens; identical to SEQ ID NO: 598

SEQ ID NO: 4195 - DNA, 4613 bp, Homosapiens
gtcacctggatagcgcaaaggaaacaagagaaaggaacagagcccctcttctggcctctgggctaccatacagaaaagcagaattggcaggaactgaaaatgactaggaagaggacatactgggtgcccaactcttctggtggcctcgtgaatcgtggcatcgacataggcgatgacatggtttcaggacttatttataaaacctatactctccaagatggcccctggagtcagcaagagagaaatcctgaggctccagggagggcagctgtcccaccgtgggggaagtatgatgctgccttgagaaccatgattcccttccgtcccaagccgaggtttcctgccccccagcccctggacaatgctggcctgttctcctacctcaccgtgtcatggctcaccccgctcatgatccaaagcttacggagtcgcttagatgagaacaccatccctccactgtcagtccatgatgcctcagacaaaaatgtccaaaggcttcaccgcctttgggaagaagaagtctcaaggcgagggattgaaaaagcttcagtgcttctggtgatgctgaggttccagagaacaaggttgattttcgatgcacttctgggcatctgcttctgcattgccagtgtactcgggccaatattgattataccaaagatcctggaatattcagaagagcagttggggaatgttgtccatggagtgggactctgctttgccctttttctctccgaatgtgtgaagtctctgagtttctcctccagttggatcatcaaccaacgcacagccatcaggttccgagcagctgtttcctcctttgcctttgagaagctcatccaatttaagtctgtaatacacatcacctcaggagaggccatcagcttcttcaccggtgatgtaaactacctgtttgaaggggtgtgctatggacccctagtactgatcacctgcgcatcgctggtcatctgcagcatttcttcctacttcattattggatacactgcatttattgccatcttatgctatctcctggttttcccactggcggtattcatgacaagaatggctgtgaaggctcagcatcacacatctgaggtcagcgaccagcgcatccgtgtgaccagtgaagttctcacttgcattaagctgattaaaatgtacacatgggagaaaccatttgcaaaaatcattgaagacctaagaaggaaggaaaggaaactattggagaagtgcgggcttgtccagagcctgacaagtataaccttgttcatcatccccacagtggccacagcggtctgggttctcatccacacatccttaaagctgaaactcacagcgtcaatggccttcagcatgctggcctccttgaatctccttcggctgtcagtgttctttgtgcctattgcagtcaaaggtctcacgaattccaagtctgcagtgatgaggttcaagaagtttttcctccaggagagccctgttttctatgtccagacattacaagaccccagcaaagctctggtctttgaggaggccaccttgtcatggcaacagacctgtcccgggatcgtcaatggggcactggagctggagaggaacgggcatgcttctgaggggatgaccaggcctagagatgccctcgggccagaggaagaagggaacagcctgggcccagagttgcacaagatcaacctggtggtgtccaaggggatgatgttaggggtctgcggcaacacggggagtggtaagagcagcctgttgtcagccatcctggaggagatgcacttgctcgagggctcggtgggggtgcagggaagcctggcctatgtcccccagcaggcctggatcgtcagcgggaacatcagggagaacatcctcatgggaggcgcatatgacaaggcccgatacctccaggtgctccactgctgctccctgaatcgggacctggaacttctgccctttggagacatgacagagattggagagcggggcctcaacctctctggggggcagaaacagaggatcagcctggcccgcgccgtctattccgaccgtcagatctacctgctggacgaccccctgtctgctgtggacgcccacgtggggaagcacatttttgaggagtgcattaagaagacactcagggggaagacggtcgtcctggtgacccaccagctgcagtacttagaattttgtggccagatcattttgttggaaaatgggaaaatctgtgaaaatggaactcacagtgagttaatgcagaaaaaggggaaatatgcccaacttatccagaagatgcacaaggaagccacttcggacatgttgcaggacacagcaaagatagcagagaagccaaaggtagaaagtcaggctctggccacctccctggaagagtctctcaacggaaatgctgtgccggagcatcagctcacacaggaggaggagatggaagaaggctccttgagttggagggtctaccaccactacatccaggcagctggaggttacatggtctcttgcataattttcttcttcgtggtgctgatcgtcttcttaacgatcttcagcttctggtggctgagctactggttggagcagggctcggggaccaatagcagccgagagagcaatggaaccatggcagacctgggcaacattgcagacaatcctcaactgtccttctaccagctggtgtacgggctcaacgccctgctcctcatctgtgtgggggtctgctcctcagggattttcaccaaggtcacgaggaaggcatccacggccctgcacaacaagctcttcaacaaggttttccgctgccccatgagtttctttgacaccatcccaataggccggcttttgaactgcttcgcaggggacttggaacagctggaccagctcttgcccatcttttcagagcagttcctggtcctgtccttaatggtgatcgccgtcctgttgattgtcagtgtgctgtctccatatatcctgttaatgggagccataatcatggttatttgcttcatttattatatgatgttcaagaaggccatcggtgtgttcaagagactggagaactatagccggtctcctttattctcccacatcctcaattctctgcaaggcctgagctccatccatgtctatggaaaaactgaagacttcatcagccagtttaagaggctgactgatgcgcagaataactacctgctgttgtttctatcttccacacgatggatggcattgaggctggagatcatgaccaaccttgtgaccttggctgttgccctgttcgtggcttttggcatttcctccaccccctactcctttaaagtcatggctgtcaacatcgtgctgcagctggcgtccagcttccaggccactgcccggattggcttggagacagaggcacagttcacggctgtagagaggatactgcagtacatgaagatgtgtgtctcggaagctcctttacacatggaaggcacaagttgtccccaggggtggccacagcatggggaaatcatatttcaggattatcacatgaaatacagagacaacacacccaccgtgcttcacggcatcaacctgaccatccgcggccacgaagtggtgggcatcgtgggaaggacgggctctgggaagtcctccttgggcatggctctcttccgcctggtggagcccatggcaggccggattctcattgacggcgtggacatttgcagcatcggcctggaggacttgcggtccaagctctcagtgatccctcaagatccagtgctgctctcaggaaccatcagattcaacctagatccctttgaccgtcacactgaccagcagatctgggatgccttggagaggacattcctgaccaaggccatctcaaagttccccaaaaagctgcatacagatgtggtggaaaacggtggaaacttctctgtgggggagaggcagctgctctgcattgccagggctgtgcttcgcaactccaagatcatccttatcgatgaagccacagcctccattgacatggagacagacaccctgatccagcgcacaatccgtgaagccttccagggctgcaccgtgctcgtcattgcccaccgtgtcaccactgtgctgaactgtgaccacatcctggttatgggcaatgggaaggtggtagaatttgatcggccggaggtactgcggaagaagcctgggtcattgttcgcagccctcatggccacagccacttcttcactgagataaggagatgtggagacttcatggaggctggcagctgagctcagaggttcacacaggtgcagcttcgaggcccacagtctgcgaccttcttgtttggagatgagaacttctcctggaagcaggggtaaatgtagggggggtggggattgctggatggaaaccctggaataggctacttgatggctctcaagaccttagaaccccagaaccatctaagacatgggattcagtgatcatgtggttctccttttaacttacatgctgaataattttataataaggtaaaagcttatagttttctgatctgtgttagaagtgttgcaaatgctgtactgactttgtaaaatataaaactaaggaaaactcac

SEQ ID NO: 4196 - protein, 1382 aa, Homosapiens; identical to SEQ ID NO: 594

SEQ ID NO: 4197 - DNA, 4089 bp, Homosapiens
gcggggtcaggcgtgttggggatgacgcccaggatggtgctttgcagcgacgtgcccttcagaaggcggctccgcaccagctgcaggttgcgggccgagtccacgctggtgcgcatggtggagccgggcagcaggacgccctcgtgggtgagcagcagcgggaggcgactggggatctggatggggctcactgatgacatgctggcagcctttcgcactgggggctgtcaaaaagagccagacagacagctgcccccggcctgccccgcagtcaccaaacctcagacccgcctccacgcctccgcttccggctacgcgctacggtccgtccccgggcccaaaagccatggcttcgcgctgctctctaggagagcctcccgaattggcaggaactgaaaatgactaggaagaggacatactgggtgcccaactcttctggtggcctcgtgaatcgtggcatcgacataggcgatgacatggtttcaggacttatttataaaacctatactctccaagatggcccctggagtcagcaagagagaaatcctgaggctccagggagggcagctgtcccaccgtgggggaagtatgatgctgccttgagaaccatgattcccttccgtcccaagccgaggtttcctgccccccagcccctggacaatgctggcctgttctcctacctcaccgtgtcatggctcaccccgctcatgatccaaagcttacggagtcgcttagatgagaacaccatccctccactgtcagtccatgatgcctcagacaaaaatgtccaaaggcttcaccgcctttgggaagaagaagtctcaaggcgagggattgaaaaagcttcagtgcttctggtgatgctgaggttccagagaacaaggttgattttcgatgcacttctgggcatctgcttctgcattgccagtgtactcgggccaatattgattataccaaagatcctggaatattcagaagagcagttggggaatgttgtccatggagtgggactctgctttgccctttttctctccgaatgtgtgaagtctctgagtttctcctccagttggatcatcaaccaacgcacagccatcaggttccgagcagctgtttcctcctttgcctttgagaagctcatccaatttaagtctgtaatacacatcacctcaggagaggccatcagcttcttcaccggtgatgtaaactacctgtttgaaggggtgtgctatggacccctagtactgatcacctgcgcatcgctggtcatctgcagcatttcttcctacttcattattggatacactgcatttattgccatcttatgctatctcctggttttcccactggcggtattcatgacaagaatggctgtgaaggctcagcatcacacatctgaggtcagcgaccagcgcatccgtgtgaccagtgaagttctcacttgcattaagctgattaaaatgtacacatgggagaaaccatttgcaaaaatcattgaagacctaagaaggaaggaaaggaaactattggagaagtgcgggcttgtccagagcctgacaagtataaccttgttcatcatccccacagtggccacagcggtctgggttctcatccacacatccttaaagctgaaactcacagcgtcaatggccttcagcatgctggcctccttgaatctccttcggctgtcagtgttctttgtgcctattgcagtcaaaggtctcacgaattccaagtctgcagtgatgaggttcaagaagtttttcctccaggagagccctgttttctatgtccagacattacaagaccccagcaaagctctggtctttgaggaggccaccttgtcatggcaacagacctgtcccgggatcgtcaatggggcactggagctggagaggaacgggcatgcttctgaggggatgaccaggcctagagatgccctcgggccagaggaagaagggaacagcctgggcccagagttgcacaagatcaacctggtggtgtccaaggtagccttgttcaggccacgcaggcaggccagctgccaggctctcaggacctgaggctaggagcttggccaggtgccccaccatttccttggttaaaaactgccctctccaagatctctccccttaaaattcaaatttttcatggagggcaaacacaggatatcgttcattttttaatgtgaattaatctatcatttaaaatttttttggcttaggtaagacccaaaataatatgagagtactgtgtgcttgtccttggaagaactaaggacacagaaaggagaagggaaaggagacccagctaacatttattacattcctcgtatgtgccaagcactatcctgtgtttgaatttggttattctgtgaactcaccttatctggttctttctctgcctaatgtttacaaaaattagcttcctgctgtctcctcttcgcccctcctcttttcttctctgttatctattaatgtagatattgataccttataataattgatatagaatagatatagatattgatctatatataatgataaatgtctaaaaaatagataatatctagtagtaataggtgttaatatctaatatctactgtctcttatctatttatactttcttccttggtgatcatctctagccctgcggttttaaattctatctctgtgctattatctctagccttgaagtatcttctggactccagactcaactgcctatttaatatctctcttaaatgtccatcaagcatttaaaatgaaataaggttttgatattcaccccctttgacgagttccccaaatcttccgtttcctgggagatggcaccatcatccttccagtggttgaggacctggaagtcacacttgattcctttccttccctccctcgaatccaatccaccagcaaggcctgtcagcttgacttccacatctgccccaaacctgccaccctcaccatagcccctccactgccctatccctgccactgtcacgccgctcccagaacctcctcatccacctctctgctcccactttcgccttcttatgagccttctaccatacagcagacagagggattttccttttttaaataattaatatatattttttatttcaatagcttttggggtacgagtgggttttggttagacggaggagttgtattgtggtgaagtcgagattttagtgcacccgtgacccgatagagtgcattgtacccaataggtagtttgtatctctcgccccactcccatcctctgtctctctgaccctccaaaatccattataccaggggaccccgacacctgggcggtagacctgcactggtccacagcctgttagaaaccaggccgcacagcaggaggtgagcagcaggccagtgagcatcaccgcctgagctccgcctcttgtcagatcagcggcagcattggattctcataggagagcgaatcttattgtgaagtgtgcatgagagggatccaggttgcacactccttatgagaatcttgcctgatgatctgaggtggaacagtttcatcctgaaaccaatcccctgccatccctcagttggtggaaaaattgtcttccatgaaactggtccctggtgccaaaaagattgggggcagctgcattataccatgacagagggatctttctaaaacataagccaatgcaagtcactctccttaaacccttcagtgacttttcactgcccttagagcccgggttcctccaaatctgtacctgtacctctgaactctttcccaccagtgttctcacagctcttgggcagcaatgacacctgctctgtagaagccttccctggctgacccatctaaaattgcctcaacccccaactttctgtctgtcataagagtcaacttcattttactcatatcacttatctccatctgatatttatttatttatgtagtctctctgtcttcccatcccctcagcttatattctgagctcaatgtgaggtcttttcttcattactaggtccatagaggaaactcagatcactatttgatgggtgaatgaatgcttcaataaatgaatgcatgcatgcatgcatgaaattc

SEQ ID NO: 4198 - protein, 553 aa, Homosapiens
MTRKRTYWVPNSSGGLVNRGIDIGDDMVSGLIYKTYTLQDGPWSQQERNPEAPGRAAVPPWGKYDAALRTMIPFRPKPRFPAPQPLDNAGLFSYLTVSWLTPLMIQSLRSRLDENTIPPLSVHDASDKNVQRLHRLWEEEVSRRGIEKASVLLVMLRFQRTRLIFDALLGICFCIASVLGPILIIPKILEYSEEQLGNVVHGVGLCFALFLSECVKSLSFSSSWIINQRTAIRFRAAVSSFAFEKLIQFKSVIHITSGEAISFFTGDVNYLFEGVCYGPLVLITCASLVICSISSYFIIGYTAFIAILCYLLVFPLAVFMTRMAVKAQHHTSEVSDQRIRVTSEVLTCIKLIKMYTWEKPFAKIIEDLRRKERKLLEKCGLVQSLTSITLFIIPTVATAVWVLIHTSLKLKLTASMAFSMLASLNLLRLSVFFVPIAVKGLTNSKSAVMRFKKFFLQESPVFYVQTLQDPSKALVFEEATLSWQQTCPGIVNGALELERNGHASEGMTRPRDALGPEEEGNSLGPELHKINLVVSKVALFRPRRQASCQALRT

SEQ ID NO: 4199 - DNA, 624 bp, Homosapiens
gggtactttgatttacagtccagcctagactgcaccaatgggggaggtgggagtcttcccagaagaaaactgaggcactggtaccagctacggggaggtgaagatattgattataccaaagatcctggaatattcagaagagcagttggggaatgttgtccatggagtgggactctgctttgccctttttctctccgaatgtgtgaagtctctgagtttctcctccagttggatcatcaaccaacgcacagccatcaggttccgagcagctgtttcctcctttgcctttgagaagctcatccaatttaagtctgtaatacacatcacctcaggagaggccatcagcttcttcaccggtgatgtaaactacctgtttgaaggggtgtgctatggacccctagtactgatcacctgcgcatcgctggtcatctgcagcatttcttcctacttcattattggatacactgcatttattgccatcttatgctatctcctggttttcccactggcggtattcatgacaagaatggctgtgaaggctcagcatcacacatctgaggtcagcgaccagcgcatccgtgtgaccagtgaagttctcacttgcattaagctgattaaaatgta

SEQ ID NO: 4200 - protein, 34 aa, Homosapiens
MTRMAVKAQHHTSEVSDQRIRVTSEVLTCIKLIK

SEQ ID NO: 4201 - DNA, 2846 bp, Homosapiens
gggtctgaggtttggtgactgcggggcaggccgggggcagctgtctgtctggctctttttgacagcccccagtgcgaaaggctgccagcatgtcatcagtgagccccatccagatccccagtcgcctcccgctgctgctcacccacgagggcgtcctgctgcccggctccaccatgcgcaccagcgtggactcggcccgcaacctgcagctggtgcggagccgccttctgaagggcacgtcgctgcaaagcaccatcctgggcgtcatccccaacacgcctgaccccgccagcgacgcgcaggacctgccgccgctgcacaggattggcacagctgcactggccgttcaggttgtgggcagtaactggcccaagccccactacactctgttgattacaggcctatgccgtttccagattgtacaggtcttaaaagagaagccatatcccattgctgaagtggagcagttggaccgacttgaggagtttcccaacacctgtaaaatgagggaggagctaggagaactatcagagcagttttacaaatatgcagtacaattggttgaaatgttggatatgtctgtccctgcagttgctaaattgagacgtcttttagatagtcttccaagggaagctttaccagacatcttgacatcaattatccgaacaagcaacaaagagaaactccagattttagatgctgtgagcctagaggagcggttcaagatgactataccactgcttgtcagacaaattgaaggcctgaaattgcttcaaaaaaccagaaaacccaagcaagatgatgataagagggttatagcaatacgccctattaggagaattacacatatctcaggtactttagaagatgaagatgaagatgaagataatgatgacattgtcatgctagagaaaaaaatacgaacatctagtatgccagagcaggcccataaagtctgtgtcaaagagataaagagactcaaaaaaatgcctcagtcaatgccagaatatgctctgactagaaattatttggaacttatggtagaacttccttggaacaaaagtacaactgaccgcctggacattagggcagcccggattcttctggataatgaccattacgccatggaaaaattgaagaaaagagtactggaatacttggctgtcagacagctcaaaaataacctgaagggcccaatcctatgctttgttggccctcctggagttggtaaaacaagtgtgggaagatcagtggccaagactctaggtcgagagttccacaggattgcacttggaggagtatgtgatcagtctgacattcgaggacacaggcgcacctatgttggcagcatgcctggtcgcatcatcaacggcttgaagactgtgggagtgaacaacccagtgttcctattagatgaggttgacaaactgggaaaaagtctacagggtgatccagcagcagctctgcttgaggtgttggatcctgaacaaaaccataacttcacagatcattatctaaatgtggcctttgacctttctcaagttctttttatagctactgccaacaccactgctaccattccagctgccttgttggacagaatggagatcattcaggttccaggttatacacaggaggagaagatagagattgcccataggcacttgatccccaagcagctggaacaacatgggctgactccacagcagattcagataccccaggtcaccactcttgacatcatcaccaggtataccagagaggcaggggttcgttctctggatagaaaacttggggccatttgccgagctgtggccgtgaaggtggcagaaggacagcataaggaagccaagttggaccgttctgatgtgactgagagagaaggttgcagagaacacatcttagaagatgaaaaacctgaatctatcagtgacactactgacttggctctaccacctgaaatgccgattttgattgatttccatgctctgaaagacatccttgggcccccgatgtatgaaatggaggtatctcagcgtttgagtcagccaggagtagcaataggtttggcttggactcccttaggtggagaaatcatgttcgtggaggcgagtcgaatggatggcgagggccagttaactctgaccggccagctcggggacgtgatgaaggagtccgcccacctcgctatcagctggctccgcagcaacgcaaagaagtaccagctgaccaatgcttttggaagttttgatcttcttgacaacacagacatccatctgcacttcccagctggagctgtcacaaaagatggaccatctgctggagttaccatagtaacctgtctcgcctcactttttagtgggcggctggtacgttcagatgtagccatgactggagaaattacactgagaggtcttgttcttccagtgggtggaattaaagacaaagtgctggcggcacacagagcgggactgaagcaagtcattattcctcggagaaatgaaaaagaccttgagggaatcccaggcaacgtacgacaggatttaagttttgtcacagcaagctgcctggatgaggttcttaatgcagcttttgatggtggctttactgtcaagaccagacctggtctgttaaatagcaaactgtaggtccaaatctcaattttttagaattttaagttatgaagtgctcaaaggtactgacacagttgattttattcacaccattaggggtatgcaagatgtccctgttttataaacataatcacaacagtaataaacctcaagtagtggctagtgtttagtatagaaatataagatgttgatttagtaaactgataaaaatcg

SEQ ID NO: 4202 - protein, 852 aa, Homosapiens; identical to SEQ ID NO: 600

SEQ ID NO: 4203 - DNA, 4825 bp, Homosapiens
gggtctgaggtttggtgactgcggggcaggccgggggcagctgtctgtctggctctttttgacagcccccagtgcgaaaggctgccagcatgtcatcagtgagccccatccagatccccagtcgcctcccgctgctgctcacccacgagggcgtcctgctgcccggctccaccatgcgcaccagcgtggactcggcccgcaacctgcagctggtgcggagccgccttctgaagggcacgtcgctgcaaagcaccatcctgggcgtcatccccaacacgcctgaccccgccagcgacgcgcaggacctgccgccgctgcacaggattggcacagctgcactggccgttcaggttgtgggcagtaactggcccaagccccactacactctgttgattacaggcctatgccgtttccagattgtacaggtcttaaaagagaagccatatcccattgctgaagtggagcagttggaccgacttgaggagtttcccaacacctgtaaaatgagggaggagctaggagaactatcagagcagttttacaaatatgcagtacaattggttgaaatgttggatatgtctgtccctgcagttgctaaattgagacgtcttttagatagtcttccaagggaagctttaccagacatcttgacatcaattatccgaacaagcaacaaagagaaactccagattttagatgctgtgagcctagaggagcggttcaagatgactataccactgcttgtcagacaaattgaaggcctgaaattgcttcaaaaaaccagaaaacccaagcaagatgatgataagagggttatagcaatacgccctattaggagaattacacatatctcaggtactttagaagatgaagatgaagatgaagataatgatgacattgtcatgctagagaaaaaaatacgaacatctagtatgccagagcaggcccataaagtctgtgtcaaagagataaagagactcaaaaaaatgcctcagtcaatgccagaatatgctctgactagaaattatttggaacttatggtagaacttccttggaacaaaagtacaactgaccgcctggacattagggcagcccggattcttctggataatgaccattacgccatggaaaaattgaagaaaagagtactggaatacttggctgtcagacagctcaaaaataacctgaagggcccaatcctatgctttgttggccctcctggagttggtaaaacaagtgtgggaagatcagtggccaagactctaggtcgagagttccacaggattgcacttggaggagtatgtgatcagtctgacattcgaggacacaggcgcacctatgttggcagcatgcctggtcgcatcatcaacggcttgaagactgtgggagtgaacaacccagtgttcctattagatgaggttgacaaactgggaaaaagtctacagggtgatccagcagcagctctgcttgaggtgttggatcctgaacaaaaccataacttcacagatcattatctaaatgtggcctttgacctttctcaagttctttttatagctactgccaacaccactgctaccattccagctgccttgttggacagaatggagatcattcaggttccaggttatacacaggaggagaagatagagattgcccataggcacttgatccccaagcagctggaacaacatgggctgactccacagcagattcagataccccaggtcaccactcttgacatcatcaccaggtataccagagaggcaggggttcgttctctggatagaaaacttggggccatttgccgagctgtggccgtgaaggtggcagaaggacagcataaggaagccaagttggaccgttctgatgtgactgagagagaaggttgcagagaacacatcttagaagatgaaaaacctgaatctatcagtgacactactgacttggctctaccacctgaaatgccgattttgattgatttccatgctctgaaagacatccttgggcccccgatgtatgaaatggaggtatctcagcgtttgagtcagccaggagtagcaataggtttggcttggactcccttaggtggagaaatcatgttcgtggaggcgagtcgaatggatggcgagggccagttaactctgaccggccagctcggggacgtgatgaaggagtccgcccacctcgctatcagctggctccgcagcaacgcaaagaagtaccagctgaccaatgcttttggaagttttgatcttcttgacaacacagacatccatctgcacttcccagctggagctgtcacaaaagatggaccatctgctggagttaccatagtaacctgtctcgcctcactttttagtgggcggctggtacgttcagatgtagccatgactggagaaattacactgagaggtcttgttcttccagtgggtggaattaaagacaaagtgctggcggcacacagagcgggactgaagcaagtcattattcctcggagaaatgaaaaagaccttgagggaatcccaggcaacgtacgacaggatttaagttttgtcacagcaagctgcctggatgaggttcttaatgcagcttttgatggtggctttactgtcaagaccagacctggtctgttaaatagcaaactgtaggtccaaatctcaattttttagaattttaagttatgaagtgctcaaaggtactgacacagttgattttattcacaccattaggggtatgcaagatgtccctgttttataaacataatcacaacagtaataaacctcaagtagtggctagtgtttagtatagaaatataagatgttgatttagtaaactgataaaaatcgaattcttgtctttttagtgggatccttactgtccctggaaagatatagcatagtggttctcagcacagtctccagaacagaagcatctgtagtacctggtaacttgttagaaatgtacattctcaggctccacagcaggccgcctgaatcaaatcctgggaggtggggacagaaatctgtgttttaagaagccttccaggtaattctgctgcacactcaagttcaggaaccaccggtatagaccattaccttagtggatttacctgtagagtttattggatcctgaaaccaatcaattacttagaactaggcaaagatgaaagtatagccaactattcttggctatatatatatattcaagtgggccgggcgtgatggctcacacctgtaattccagcactttgggaggtcgaggtaggcagatcaccgagcccaagagttcaagacaatcctggccaacggcgaaactctgtctctacaaaaaatatacaggcgtgttagcatgtgcctgtaatcccagcttcttgggaagctgaggcacaagaattgcctgaacccaggaggtggaggttgcagtgagctgggatcgcgccattgcactccagcctggctgacagagcgagactgtctctaaaaaaaaaagactcaagtggaccctacaatgaagcctacacatcccaatagaagccccttcttatgctgagggaagcagccctcagaacatgatagcttgtatccagcagagtggcacgtgctggcacacctcacagaagcaccctggccctggatgcctgcaacctcagaagagtgcagctcccagagggaggcagccatccatctgggatggtcctaagcatggaatcctaactcctgattccgtctcctatttcttgcttggctacgccagttcccaaatctggtagatgtccatgcccatgtgctcctgctgggactcaattcaggctatgtatgactatgaagtcaggctcatctgcttactggctgtgtgaactttttgtatcttggttttcttcatccatgaaatccaagtaatactacctaattgttactgtggagattaagttcaaatgcaatgtatagtaatattaagcaatttctagttattattctagccagtaatggacttcagaatcttttattacacaatataagaatatgtatgtaaagacattttggaatttcctggatgagaaggaagtctgggctgggcatggtggctcacgcctgtaaccctagcactttaggaaatcgaggcgagtggatcacttaagctcaggagttcaaggccagcctgggcaacatggcaaaaccccatttctacaaaaaatacaaaaattagctgggcatggtggcacccgcctgtagtccagctacttgaggctgagatgggaggatgagggaggtcggggctgcagtgagccaagatcacgccactgcactccagcaccctgggcgacagagtgagaccctgtctcaaaaaaaaaaaaaaaaaaaaagattgggccaaaatactgtgataaaatagcaggcctgctgataaaagtttatctgaatgcattgagaggaaaagtccagacctaggactagttatggcagttggagagaaagaacatcgggatgtttgaaaatatgccattgactatcttaactactgtaattttatcatttccaacgtcatctaactggggactagaacaaactgtgaattcactttcagcaaccagagggcgctaatccacacccacatcgctctgccctgttccacccagcaggggcaacaaggatataacttggggttctcggtattcttcctttagtcctgacacaggcagccttgcactttgtagcagcaggagggcacttgctttaagcatatctttcgaaaggcatccattgagagaataatgcattctccccttgctgtgtatgacatggaacagtatgaccattgcactagc

SEQ ID NO: 4204 - protein, 852 aa, Homosapiens; identical to SEQ ID NO: 600

SEQ ID NO: 4205 - DNA, 4589 bp, Homosapiens
gtctgaggtttggtgactgcggggcaggccgggggcagctgtctgtctggctctttttgacagcccccagtgcgaaaggctgccagcatgtcatcagtgagccccatccagatccccagtcgcctcccgctgctgctcacccacgagggcgtcctgctgcccggctccaccatgcgcaccagcgtggactcggcccgcaacctgccgccgctgcacaggattggcacagctgcactggccgttcaggttgtgggcagtaactggcccaagccccactacactctgttgattacaggcctatgccgtttccagattgtacaggtcttaaaagagaagccatatcccattgctgaagtggagcagttggaccgacttgaggagtttcccaacacctgtaaaatgagggaggagctaggagaactatcagagcagttttacaaatatgcagtacaaattttagatgctgtgagcctagaggagcggttcaagatgactataccactgcttgtcagacaaattgaaggcctgaaattgcttcaaaaaaccagaaaacccaagcaagatgatgataagagggttatagcaatacgccctattaggagaattacacatatctcaggtactttagaagatgaagatgaagatgaagataatgatgacattgtcatgctagagaaaaaaatacgaacatctagtatgccagagcaggcccataaagtctgtgtcaaagagataaagagactcaaaaaaatgcctcagtcaatgccagaatatgctctgactagaaattatttggaacttatggtagaacttccttggaacaaaagtacaactgaccgcctggacattagggcagcccggattcttctggataatgaccattacgccatggaaaaattgaagaaaagagtactggaatacttggctgtcagacagctcaaaaataacctgaagggcccaatcctatgctttgttggccctcctggagttggtaaaacaagtgtgggaagatcagtggccaagactctaggtcgagagttccacaggattgcacttggaggagtatgtgatcagtctgacattcgaggacacaggcgcacctatgttggcagcatgcctggtcgcatcatcaacggcttgaagactgtgggagtgaacaacccagtgttcctattagatgaggttgacaaactgggaaaaagtctacagggtgatccagcagcagctctgcttgaggtgttggatcctgaacaaaaccataacttcacagatcattatctaaatgtggcctttgacctttctcaagttctttttatagctactgccaacaccactgctaccattccagctgccttgttggacagaatggagatcattcaggttccaggttatacacaggaggagaagatagagattgcccataggcacttgatccccaagcagctggaacaacatgggctgactccacagcagattcagataccccaggtcaccactcttgacatcatcaccaggtataccagagaggcaggggttcgttctctggatagaaaacttggggccatttgccgagctgtggccgtgaaggtggcagaaggacagcataaggaagccaagttggaccgttctgatgtgactgagagagaaggttgcagagaacacatcttagaagatgaaaaacctgaatctatcagtgacactactgacttggctctaccacctgaaatgccgattttgattgatttccatgctctgaaagacatccttgggcccccgatgtatgaaatggaggtatctcagcgtttgagtcagccaggagtagcaataggtttggcttggactcccttaggtggagaaatcatgttcgtggaggcgagtcgaatggatggcgagggccagttaactctgaccggccagctcggggacgtgatgaaggagtccgcccacctcgctatcagctggctccgcagcaacgcaaagaagtaccagctgaccaatgcttttggaagttttgatcttcttgacaacacagacatccatctgcacttcccagctggagctgtcacaaaagatggaccatctgctggagttaccatagtaacctgtctcgcctcactttttagtgggcggctggtacgttcagatgtagccatgactggagaaattacactgagaggtcttgttcttccagtgggtggaattaaagacaaagtgctggcggcacacagagcgggactgaagcaagtcattattcctcggagaaatgaaaaagaccttgagggaatcccaggcaacgtacgacaggatttaagttttgtcacagcaagctgcctggatgaggttcttaatgcagcttttgatggtggctttactgtcaagaccagacctggtctgttaaatagcaaactgtaggtccaaatctcaattttttagaattttaagttatgaagtgctcaaaggtactgacacagttgattttattcacaccattaggggtatgcaagatgtccctgttttataaacataatcacaacagtaataaacctcaagtagtggctagtgtttagtatagaaatataagatgttgatttagtaaactgataaaaatcgaattcttgtctttttagtgggatccttactgtccctggaaagatatagcatagtggttctcagcacagtctccagaacagaagcatctgtagtacctggtaacttgttagaaatgtacattctcaggctccacagcaggccgcctgaatcaaatcctgggaggtggggacagaaatctgtgttttaagaagccttccaggtaattctgctgcacactcaagttcaggaaccaccggtatagaccattaccttagtggatttacctgtagagtttattggatcctgaaaccaatcaattacttagaactaggcaaagatgaaagtatagccaactattcttggctatatatatatattcaagtgggccgggcgtgatggctcacacctgtaattccagcactttgggaggtcgaggtaggcagatcaccgagcccaagagttcaagacaatcctggccaacggcgaaactctgtctctacaaaaaatatacaggcgtgttagcatgtgcctgtaatcccagcttcttgggaagctgaggcacaagaattgcctgaacccaggaggtggaggttgcagtgagctgggatcgcgccattgcactccagcctggctgacagagcgagactgtctctaaaaaaaaaagactcaagtggaccctacaatgaagcctacacatcccaatagaagccccttcttatgctgagggaagcagccctcagaacatgatagcttgtatccagcagagtggcacgtgctggcacacctcacagaagcaccctggccctggatgcctgcaacctcagaagagtgcagctcccagagggaggcagccatccatctgggatggtcctaagcatggaatcctaactcctgattccgtctcctatttcttgcttggctacgccagttcccaaatctggtagatgtccatgcccatgtgctcctgctgggactcaattcaggctatgtatgactatgaagtcaggctcatctgcttactggctgtgtgaactttttgtatcttggttttcttcatccatgaaatccaagtaatactacctaattgttactgtggagattaagttcaaatgcaatgtatagtaatattaagcaatttctagttattattctagccagtaatggacttcagaatcttttattacacaatataagaatatgtatgtaaagacattttggaatttcctggatgagaaggaagtctgggctgggcatggtggctcacgcctgtaaccctagcactttaggaaatcgaggcgagtggatcacttaagctcaggagttcaaggccagcctgggcaacatggcaaaaccccatttctacaaaaaatacaaaaattagctgggcatggtggcacccgcctgtagtccagctacttgaggctgagatgggaggatgagggaggtcggggctgcagtgagccaagatcacgccactgcactccagcaccctgggcgacagagtgagaccctgtctcaaaaaaaaaaaaaaaaaaaaagattgggccaaaatactgtgataaaatagcaggcctgctgataaaagtttatctgaatgcattgagaggaaaagtccagacctaggactagttatggcagttggagagaaagaacatcgggatgtttgaaaatatgccattgactatcttaactactgtaattttatcatttccaacgtcatctaactggggactagaacaaactgtgaattcactttcagcaaccagagggcgctaatccacacccacatcgctctgccctgttccacccagcaggggcaacaaggatataacttggggttctcggtattcttcctttagtcctgacacaggcagccttgcactttgtagcagcaggagggcacttgctttaagcatatctttcgaaaggcatccattgagagaataatgcattctccccttgctgtgtatgacatggaacagtatgaccattgcactagc

SEQ ID NO: 4206 - protein, 774 aa, Homosapiens
MSSVSPIQIPSRLPLLLTHEGVLLPGSTMRTSVDSARNLPPLHRIGTAALAVQVVGSNWPKPHYTLLITGLCRFQIVQVLKEKPYPIAEVEQLDRLEEFPNTCKMREELGELSEQFYKYAVQILDAVSLEERFKMTIPLLVRQIEGLKLLQKTRKPKQDDDKRVIAIRPIRRITHISGTLEDEDEDEDNDDIVMLEKKIRTSSMPEQAHKVCVKEIKRLKKMPQSMPEYALTRNYLELMVELPWNKSTTDRLDIRAARILLDNDHYAMEKLKKRVLEYLAVRQLKNNLKGPILCFVGPPGVGKTSVGRSVAKTLGREFHRIALGGVCDQSDIRGHRRTYVGSMPGRIINGLKTVGVNNPVFLLDEVDKLGKSLQGDPAAALLEVLDPEQNHNFTDHYLNVAFDLSQVLFIATANTTATIPAALLDRMEIIQVPGYTQEEKIEIAHRHLIPKQLEQHGLTPQQIQIPQVTTLDIITRYTREAGVRSLDRKLGAICRAVAVKVAEGQHKEAKLDRSDVTEREGCREHILEDEKPESISDTTDLALPPEMPILIDFHALKDILGPPMYEMEVSQRLSQPGVAIGLAWTPLGGEIMFVEASRMDGEGQLTLTGQLGDVMKESAHLAISWLRSNAKKYQLTNAFGSFDLLDNTDIHLHFPAGAVTKDGPSAGVTIVTCLASLFSGRLVRSDVAMTGEITLRGLVLPVGGIKDKVLAAHRAGLKQVIIPRRNEKDLEGIPGNVRQDLSFVTASCLDEVLNAAFDGGFTVKTRPGLLNSKL

SEQ ID NO: 4207 - DNA, 844 bp, Homosapiens
gtatgagaagaaggatgccgataagttggggattgattttaaaaacaagcaaagatatgttttttatggttaaatgataatgaggtgggagatggggaagcaaaagagaggcttgccttaatatttaatcttaaacttggaaaataatagtgatctgactaaacattgcctcatttttgtctgtattgttttgagtagcttaaaggaagaataatgtttatgctacgtattaactcattcagtttttcagtcttttcgatatttctcatttggatttatctccattgtgatttttctgtccactttgtaagccacaaaatactcattcccttctatcagttttaacaacttaaatttttatatttaagtattacatttaaataatttaagtcaattcacacaaatataaggtaactaacttcttttaagatgaagttttatgaaataatgtttgcataattgtttttcatttgttctttggtaaaaagaaataatatattattgttatgatatatcttaaatcactgtggatattaactcctagaaatactttaccagctgtttacttagataataaaattatattattgcaagaaatccttgtctcaactttcaaacaagatgagaagaaaaatgaacttgtgatttccacattgatacattttcatatgcaacctgaaatggaaaccagaagtaaactttaagtagctgttgctaataatgatgagcatcactggaaagctcactgtgtgccagggaccgtgctgtgtgctttgcctgtgttctctcatgatccttatattaatataacccaccaggttgacactattttccccatcttata

SEQ ID NO: 4208 - protein, 65 aa, Homosapiens
MIYLKSLWILTPRNTLPAVYLDNKIILLQEILVSTFKQDEKKNELVISTLIHFHMQPEMETRSKL

SEQ ID NO: 4209 - DNA, 240 bp, Homosapiens
cctggaacctgaatgatctccattctgtccaacaaggcagctggaatggtagcagtggtgttggcagtagctataaaaagaatttccaaatcttacctcaagcagagctgctgctggatcaccctgtagactttttcccagtttgtcaacctcatctaataggaacactgggttgttcactcccacagtcttcaagccgttgatgatgcgaccaggcatgctgccaacataggtgcgcct

SEQ ID NO: 4210 - protein, 38 aa, Homosapiens
MISILSNKAAGMVAVVLAVAIKRISKSYLKQSCCWITL

SEQ ID NO: 4211 - DNA, 6000 bp, Homosapiens
acttgaggtcaggagtttgagaccagtctggccaacatggtgagaccacatctctacaaaaaatacaaaaattagcgggtgtggtggcctgtgtgcgcccatagtaccagccacttgggaggcagaggcaggagaatcacttgaagccaggaggcagagttttcagtgagctgaaattgtgtcactgtacttcaagcctgggcaatggagtgagactgtctcaaaatatatatatatttgcagcccaataaagatacttagataaaactattgggtttattccttgaaaactagggcatgtgtagctagatctggctcataaaaagcaaagttatttacatatattttaaggtaaaattgcctctgataaatgtcaaagaggaagtttaggtctttcttctggcagaaagccagagagtaagtgctgaatgtgacgcagaatcatgttaggtaacaaggactttgaggtaagtggctgaagtcttctgtggagtcagccgactcttgcaggattgtgtggtatcagtcacctttagcatttgccaacccaactctgatcattcttcttctttcaaggtatctcagcgtttgagtcagccaggagtagcaataggtttggcttggactcccttaggtggagaaatcatgttcgtggaggcgagtcgaatggatggcgagggccagttaactctgaccggccagctcggggacgtgatgaaggagtccgcccacctcgctatcagctggctccgcagcaacgcaaagaagtaccagctgaccaatggtaggagcctgcacccggccaggcaggcgtgacccaggaggcggtaccttccatggcggagactggcatgagctcgagactgccagttacacatctagcaaagtacacaccgttttgaacccctgtggaaatcctagttcccatttcaggactatttgactagtgcctgaactagaaactaattcaaaaggtttattttgttttaatacgacttagagtagaatggaactgttcttccacaccctcacccaaattgtactgtccaccaatattttgaagaattcatttacccaaaacattcatttttgtttgtgactttttttttaggagaaaaagaaaacaggtttaatttttctacattaaagtccctttttcctttttaaagcttttggaagttttgatcttcttgacaacacagacatccatctgcacttcccagctggagctgtcacaaaagatggaccatctgctggagttaccatagtaacctgtctcgcctcactttttagtgggcggctggtacgttcagatgtagccatgactggagaaattacactgagaggtcttgttcttccagtaagtatgaaaaaacaatttatatggttattttttatttaatttttgaaaattaatattatttttaaatacgggtttgccttctttctatgaaaaccttggttttaagtatatattatatttttatgcctgtaactaattcatattttaaaattttgatcaaataaaagaaaaactgacaatttttcacattttccttttttttttttttttttttttgaaatagacaggtctcactctgttgcccaggctggagtgcagtggtgtgactgtagctcactatagccaccaagtcctgggctcaagcgatcctcctgtctatctcccgaatagctgggactataggagcacgccaccatgctcagctaatttattttattttgcgtagagacagggtctctctgtgttgtccaggcttgtctcaaactccaggtctcatgcagtcctctcatctccacctcccaaagtgctgggattacaggcgtgagccaccacattcagcccacgtttcccattctaagatttgctaagggaaaaaaatattagtgtggtcatcagaaatattggcagttacatgaaaatttgaggccttgttctacttgacaaattgttaaagatatagcacatgtgcaaaatgggatagtagttgtttttaagctttaagcccatttcttaaatttgaagtttctttgagacctcctgtccccctgcagaaaactttgctagtatagaatggaaactctaataaagattaaccatatctaatgactacattttgaaaaggttctatacatgtggggtcttgaggctccagatcctaaactgcttataaaaatagtgtgataaaatgtacagaacttgagagtatttaaagttgttagttgagtattagtctacaacagactagactacaattttagtccacaacaagattttggcaggttcatagcaagatgaggaaaaaaaaaaagaaatagtctttttttcttttttctatcgagattgtgccactgcactctagcttgggtgacagagtaagactgtctcaaaaaaaaaaaaaatagtaatgaaagctgtgagggaaaatgttttacatctagtcttgtatacatggccttagtatcaatcaagtgtgaaagtaaaatattttcaaacatgcaaggaatcagttcatcttacactcttttgaagaaggtactttgaaggagtacttcagcagcatgaacaaaaccttgaaagaagatgccagtggggcgggaaggcctggagcagccagccagtcttaattggagcagatgcaacacattaccccaaagcaagaatactccatactcttcaagttcctgtgggccaggaattcaggagaggctgagctgggttcttgtggcccagggtctctggccttacagtctaggttccagccaggctgcagtcacatgaaggctgacaggctggagaaactgcttccatggtggttgactcatgtgactggcaaattggtcccatctagtggcaggaggccccagttcctcacctgatggacttgcccataggctgcttgagtgacctcagacattatgactggccacctccagggcaggtgatcaagagagattcaggcagcagctctcgttttttgtgactcagccgtggagatcatacagcatcactcccaccacactctgtttcttaccgagtcacaaagcctggcccacattcaagcagggggaccattgtagacatgtttgaaagccaccataggagcctagtttagggatacattttcttcattaaccagcatggaggttctggctttaaacctgtagagagggaagtaaccccagcacacagctaagctctgcaggagcggcgctcatggtcagaatcacgtgctgctttttcagatcaacctaaagactagacggttgtgattacacctgaatgccaatttactttgacagcatttataaaaacaatcattgacagaagaggaactcatacctatcaacaatttagaatccccctcatcagagtctttaatataacaccaattgaaacattaaaaaaaggttactacttatcctttttcctggctttcctagctcatgctataacaaaacggaagatgatttggatgttttaaaatagtagtggttaaattcagtgaaagaaagctgggtcagggtttctttcagcttgagggtgatcattaaccctaaaaacttttttctctccttacaggtgggtggaattaaagacaaagtgctggcggcacacagagcgggactgaagcaagtcattattcctcggagaaatgaaaaagaccttgagggaatcccaggcaacgtacgacaggatttaagttttgtcacagcaagctgcctggatgaggttcttaatgcagcttttgatggtggctttactgtcaagaccagacctggtctgttaaatagcaaactgtaggtccaaatctcaattttttagaattttaagttatgaagtgctcaaaggtactgacacagttgattttattcacaccattaggggtatgcaagatgtccctgttttataaacataatcacaacagtaataaacctcaagtagtggctagtgtttagtatagaaatataagatgttgatttagtaaactgataaaaatcgaattcttgtctttttagtgggatccttactgtccctggaaagatatagcatagtggttctcagcacagtctccagaacagaagcatctgtagtacctggtaacttgttagaaatgtacattctcaggctccacagcaggccgcctgaatcaaatcctgggaggtggggacagaaatctgtgttttaagaagccttccaggtaattctgctgcacactcaagttcaggaaccaccggtatagaccattaccttagtggatttacctgtagagtttattggatcctgaaaccaatcaattacttagaactaggcaaagatgaaagtatagccaactattcttggctatatatatatattcaagtgggccgggcgtgatggctcacacctgtaattccagcactttgggaggtcgaggtaggcagatcaccgagcccaagagttcaagacaatcctggccaacggcgaaactctgtctctacaaaaaatatacaggcgtgttagcatgtgcctgtaatcccagcttcttgggaagctgaggcacaagaattgcctgaacccaggaggtggaggttgcagtgagctgggatcgcgccattgcactccagcctggctgacagagcgagactgtctctaaaaaaaaaagactcaagtggaccctacaatgaagcctacacatcccaatagaagccccttcttatgctgagggaagcagccctcagaacatgatagcttgtatccagcagagtggcacgtgctggcacacctcacagaagcaccctggccctggatgcctgcaacctcagaagagtgcagctcccagagggaggcagccatccatctgggatggtcctaagcatggaatcctaactcctgattccgtctcctatttcttgcttggctacgccagttcccaaatctggtagatgtccatgcccatgtgctcctgctgggactcaattcaggctatgtatgactatgaagtcaggctcatctgcttactggctgtgtgaactttttgtatcttggttttcttcatccatgaaatccaagtaatactacctaattgttactgtggagattaagttcaaatgcaatgtatagtaatattaagcaatttctagttattattctagccagtaatggacttcagaatcttttattacacaatataagaatatgtatgtaaagacattttggaatttcctggatgagaaggaagtctgggctgggcatggtggctcacgcctgtaaccctagcactttaggaaatcgaggcgagtggatcacttaagctcaggagttcaaggccagcctgggcaacatggcaaaaccccatttctacaaaaaatacaaaaattagctgggcatggtggcacccgcctgtagtccagctacttgaggctgagatgggaggatgagggaggtcggggctgcagtgagccaagatcacgccactgcactccagcaccctgggcgacagagtgagaccctgtctcaaaaaaaaaaaaaaaaaaaaagattgggccaaaatactgtgataaaatagcaggcctgctgataaaagtttatctgaatgcattgagaggaaaagtccagacctaggactagttatggcagttggagagaaagaacatcgggatgtttgaaaatatgccattgactatcttaactactgtaattttatcatttccaacgtcatctaactggggactagaacaaactgtgaattcactttcagcaaccagagggcgctaatccacacccacatcgctctgccctgttccacccagcaggggcaacaaggatataacttggggttctcggtattcttcctttagtcctgacacaggcagccttgcactttgtagcagcaggagggcacttgctttaagcatatctttcgaaaggcatccattgagagaataatgcattctccccttgctgtgtatgacatggaacagtatgaccattgcactagc

SEQ ID NO: 4212 - protein, 80 aa, Homosapiens
MQHITPKQEYSILFKFLWARNSGEAELGSCGPGSLALQSRFQPGCSHMKADRLEKLLPWWLTHVTGKLVPSSGRRPQFLT

SEQ ID NO: 4213 - DNA, 1224 bp, Homosapiens
atcattcttcttctttcaaggtatctcagcgtttgagtcagccaggagtagcaataggtttggcttggactcccttaggtggagaaatcatgttcgtggaggcgagtcgaatggatggcgagggccagttaactctgaccggccagctcggggacgtgatgaaggagtccgcccacctcgctatcagctggctccgcagcaacgcaaagaagtaccagctgaccaatggtaggagcctgcacccggccaggcaggcgtgacccaggaggcggtaccttccatggcggagactggcatgagctcgagactgccagttacacatctagcaaagtacacaccgttttgaacccctgtggaaatcctagttcccatttcaggactatttgactagtgcctgaactagaaactaattcaaaaggtttattttgttttaatacgacttagagtagaatggaactgttcttccacaccctcacccaaattgtactgtccaccaatattttgaagaattcatttacccaaaacattcatttttgtttgtgactttttttttaggagaaaaagaaaacaggtttaatttttctacattaaagtccctttttcctttttaaagcttttggaagttttgatcttcttgacaacacagacatccatctgcacttcccagctggagctgtcacaaaagatggaccatctgctggagttaccatagtaacctgtctcgcctcactttttagtgggcggctggtacgttcagatgtagccatgactggagaaattacactgagaggtcttgttcttccagtgggtggaattaaagacaaagtgctggcggcacacagagcgggactgaagcaagtcattattcctcggagaaatgaaaaagaccttgagggaatcccaggcaacgtacgacaggatttaagttttgtcacagcaagctgcctggatgaggttcttaatgcagcttttgatggtggctttactgtcaagaccagacctggtctgttaaatagcaaactgtaggtccaaatctcaattttttagaattttaagttatgaagtgctcaaaggtactgacacagttgattttattcacaccattaggggtatgcaagatgtccctgttttataaacataatcacaacagtaataaacctcaagtagtggctagtgtttagtatagaaatataagatgttgatttagtaaactgataaaaatcg

SEQ ID NO: 4214 - protein, 86 aa, Homosapiens [sequence omitted]

SEQ ID NO: 4215 - DNA, 3203 bp, Homosapiens
atcattcttcttctttcaaggtatctcagcgtttgagtcagccaggagtagcaataggtttggcttggactcccttaggtggagaaatcatgttcgtggaggcgagtcgaatggatggcgagggccagttaactctgaccggccagctcggggacgtgatgaaggagtccgcccacctcgctatcagctggctccgcagcaacgcaaagaagtaccagctgaccaatggtaggagcctgcacccggccaggcaggcgtgacccaggaggcggtaccttccatggcggagactggcatgagctcgagactgccagttacacatctagcaaagtacacaccgttttgaacccctgtggaaatcctagttcccatttcaggactatttgactagtgcctgaactagaaactaattcaaaaggtttattttgttttaatacgacttagagtagaatggaactgttcttccacaccctcacccaaattgtactgtccaccaatattttgaagaattcatttacccaaaacattcatttttgtttgtgactttttttttaggagaaaaagaaaacaggtttaatttttctacattaaagtccctttttcctttttaaagcttttggaagttttgatcttcttgacaacacagacatccatctgcacttcccagctggagctgtcacaaaagatggaccatctgctggagttaccatagtaacctgtctcgcctcactttttagtgggcggctggtacgttcagatgtagccatgactggagaaattacactgagaggtcttgttcttccagtgggtggaattaaagacaaagtgctggcggcacacagagcgggactgaagcaagtcattattcctcggagaaatgaaaaagaccttgagggaatcccaggcaacgtacgacaggatttaagttttgtcacagcaagctgcctggatgaggttcttaatgcagcttttgatggtggctttactgtcaagaccagacctggtctgttaaatagcaaactgtaggtccaaatctcaattttttagaattttaagttatgaagtgctcaaaggtactgacacagttgattttattcacaccattaggggtatgcaagatgtccctgttttataaacataatcacaacagtaataaacctcaagtagtggctagtgtttagtatagaaatataagatgttgatttagtaaactgataaaaatcgaattcttgtctttttagtgggatccttactgtccctggaaagatatagcatagtggttctcagcacagtctccagaacagaagcatctgtagtacctggtaacttgttagaaatgtacattctcaggctccacagcaggccgcctgaatcaaatcctgggaggtggggacagaaatctgtgttttaagaagccttccaggtaattctgctgcacactcaagttcaggaaccaccggtatagaccattaccttagtggatttacctgtagagtttattggatcctgaaaccaatcaattacttagaactaggcaaagatgaaagtatagccaactattcttggctatatatatatattcaagtgggccgggcgtgatggctcacacctgtaattccagcactttgggaggtcgaggtaggcagatcaccgagcccaagagttcaagacaatcctggccaacggcgaaactctgtctctacaaaaaatatacaggcgtgttagcatgtgcctgtaatcccagcttcttgggaagctgaggcacaagaattgcctgaacccaggaggtggaggttgcagtgagctgggatcgcgccattgcactccagcctggctgacagagcgagactgtctctaaaaaaaaaagactcaagtggaccctacaatgaagcctacacatcccaatagaagccccttcttatgctgagggaagcagccctcagaacatgatagcttgtatccagcagagtggcacgtgctggcacacctcacagaagcaccctggccctggatgcctgcaacctcagaagagtgcagctcccagagggaggcagccatccatctgggatggtcctaagcatggaatcctaactcctgattccgtctcctatttcttgcttggctacgccagttcccaaatctggtagatgtccatgcccatgtgctcctgctgggactcaattcaggctatgtatgactatgaagtcaggctcatctgcttactggctgtgtgaactttttgtatcttggttttcttcatccatgaaatccaagtaatactacctaattgttactgtggagattaagttcaaatgcaatgtatagtaatattaagcaatttctagttattattctagccagtaatggacttcagaatcttttattacacaatataagaatatgtatgtaaagacattttggaatttcctggatgagaaggaagtctgggctgggcatggtggctcacgcctgtaaccctagcactttaggaaatcgaggcgagtggatcacttaagctcaggagttcaaggccagcctgggcaacatggcaaaaccccatttctacaaaaaatacaaaaattagctgggcatggtggcacccgcctgtagtccagctacttgaggctgagatgggaggatgagggaggtcggggctgcagtgagccaagatcacgccactgcactccagcaccctgggcgacagagtgagaccctgtctcaaaaaaaaaaaaaaaaaaaaagattgggccaaaatactgtgataaaatagcaggcctgctgataaaagtttatctgaatgcattgagaggaaaagtccagacctaggactagttatggcagttggagagaaagaacatcgggatgtttgaaaatatgccattgactatcttaactactgtaattttatcatttccaacgtcatctaactggggactagaacaaactgtgaattcactttcagcaaccagagggcgctaatccacacccacatcgctctgccctgttccacccagcaggggcaacaaggatataacttggggttctcggtattcttcctttagtcctgacacaggcagccttgcactttgtagcagcaggagggcacttgctttaagcatatctttcgaaaggcatccattgagagaataatgcattctccccttgctgtgtatgacatggaacagtatgaccattgcactagc

SEQ ID NO: 4216 - protein, 86 aa, Homosapiens [sequence omitted]

SEQ ID NO: 4217 - DNA, 2208 bp, Homosapiens
caggctcatctgcttactggctgtgtgaactttttgtatcttggttttcttcatccatgaaatccaagtaatactacctaattgttactgtggagattaagttcaaatgcaatgtatagtaatattaagcaatttctagttattattctagccagtaatggacttcagaatcttttattacacaatataagaatatgtatgtaaagacattttggaatttcctggatgagaaggaagtctgggctgggcatggtggctcacgcctgtaaccctagcactttaggaaatcgaggcgagtggatcacttaagctcaggagttcaaggccagcctgggcaacatggcaaaaccccatttctacaaaaaatacaaaaattagctgggcatggtggcacccgcctgtagtccagctacttgaggctgagatgggaggatgagggaggtcggggctgcagtgagccaagatcacgccactgcactccagcaccctgggcgacagagtgagaccctgtctcaaaaaaaaaaaaaaaaaaaaagattgggccaaaatactgtgataaaatagcaggcctgctgataaaagtttatctgaatgcattgagaggaaaagtccagacctaggactagttatggcagttggagagaaagaacatcgggatgtttgaaaatatgccattgactatcttaactactgtaattttatcatttccaacgtcatctaactggggactagaacaaactgtgaattcactttcagcaaccagagggcgctaatccacacccacatcgctctgccctgttccacccagcaggggcaacaaggatataacttggggttctcggtattcttcctttagtcctgacacatctctcttgaagtcccttcttaggtcctttagggatacatatccaggagcagaactactagatcacatatgctaaggtctgaatgtccccccaccaaattcgtatgttgaagcaaccaccaacgtgataggtgaggctttaggaggtgattatgtcatgagagctccatcctcattaatggatttagtgcctttataaaggggctcaagggaaccaattacctcctttttgcccttcgattcccttccaccatatgaggacacagcaacaggccccgtcctagaagctgagactgggccctcaatagatgataccagtctgccagcacgctgatcgtgggcttctcagtcttcacaactatgagaaataaattcgtacttttaaattacccagtctcaggtattctgttacggttaacacaaatgactaagacaacaggataattctgtttaactttttgagaactgccaaacttttccaccgcagctgcaccatttgacattccttccagcaatgcacaaatgttccagtttctccacatccttgccagcactcattttctgggttttttataatagccctccaaatgggtgtgacgtattttgattctatgtccctaatgactagtgatgttgagcattttctagcattgatttttaagatgttacccaaagaccccttgtatcaaaataagctggatttttttattgaaaattattaactctagaaattttagtttaaactagacttagggatatgtgtattttaccggtattccacgttttatgcatgggtttttaaaacttctcaagtattaaaactaaaagctttaggtgctttgcttatcaagaaatcctacactgtccactggagacatccatgtttttacttggctctgcccctttagtggtccctgtgaaccttacctcaaaccatgcatctggggcagagatccttacttgcttggtggttacaaatgcaaatacagtgaagaatgtcatctttgtgattgttcctgaaatagttcacgagaaatccatgaccgtaaagtactgtgatagtgatgtctaccactgtgagcttccagtactaggtgattggtctgcattcacagtgaccaaaatcagctatgtggccaggtaattcactgctgagggctttggattttcctttatgaactactgaaatgaggtcaacttgactattactaagggacattttgctacaaagaatgttagttttgccaattccctttccaaatctaaaatttattttaaccaggattttagatgtaaacatcaagtagttttggttgtttcaatgaagtaacatgtttaagctc

SEQ ID NO: 4218 - protein, 87 aa, Homosapiens [sequence omitted]

SEQ ID NO: 4219 - DNA, 2781 bp, Homosapiens
caggctcatctgcttactggctgtgtgaactttttgtatcttggttttcttcatccatgaaatccaagtaatactacctaattgttactgtggagattaagttcaaatgcaatgtatagtaatattaagcaatttctagttattattctagccagtaatggacttcagaatcttttattacacaatataagaatatgtatgtaaagacattttggaatttcctggatgagaaggaagtctgggctgggcatggtggctcacgcctgtaaccctagcactttaggaaatcgaggcgagtggatcacttaagctcaggagttcaaggccagcctgggcaacatggcaaaaccccatttctacaaaaaatacaaaaattagctgggcatggtggcacccgcctgtagtccagctacttgaggctgagatgggaggatgagggaggtcggggctgcagtgagccaagatcacgccactgcactccagcaccctgggcgacagagtgagaccctgtctcaaaaaaaaaaaaaaaaaaaaagattgggccaaaatactgtgataaaatagcaggcctgctgataaaagtttatctgaatgcattgagaggaaaagtccagacctaggactagttatggcagttggagagaaagaacatcgggatgtttgaaaatatgccattgactatcttaactactgtaattttatcatttccaacgtcatctaactggggactagaacaaactgtgaattcactttcagcaaccagagggcgctaatccacacccacatcgctctgccctgttccacccagcaggggcaacaaggatataacttggggttctcggtattcttcctttagtcctgacacatctctcttgaagtcccttcttaggtcctttagggatacatatccaggagcagaactactagatcacatatgctaaggtctgaatgtccccccaccaaattcgtatgttgaagcaaccaccaacgtgataggtgaggctttaggaggtgattatgtcatgagagctccatcctcattaatggatttagtgcctttataaaggggctcaagggaaccaattacctcctttttgcccttcgattcccttccaccatatgaggacacagcaacaggccccgtcctagaagctgagactgggccctcaatagatgataccagtctgccagcacgctgatcgtgggcttctcagtcttcacaactatgagaaataaattcgtacttttaaattacccagtctcaggtattctgttacggttaacacaaatgactaagacaacaggataattctgtttaactttttgagaactgccaaacttttccaccgcagctgcaccatttgacattccttccagcaatgcacaaatgttccagtttctccacatccttgccagcactcattttctgggttttttataatagccctccaaatgggtgtgacgtattttgattctatgtccctaatgactagtgatgttgagcattttctagcattgatttttaagatgttacccaaagaccccttgtatcaaaataagctggatttttttattgaaaattattaactctagaaattttagtttaaactagacttagggatatgtgtattttaccggtattccacgttttatgcatgggtttttaaaacttctcaagtattaaaactaaaagctttaggtgctttgcttatcaagaaatcctacactgtccactggagacatccatgtttttacttggctctgcccctttagtggtccctgtgaaccttacctcaaaccatgcatctggggcagagatccttacttgcttggtggttacaaatgcaaatacagtgaagaatgtcatctttgtgattgttcctgaaatagttcacgagaaatccatgaccgtaaagtactgtgatagtgatgtctaccactgtgagcttccagtactaggtgattggtctgcattcacagtgaccaaaatcagctatgtggccaggtaattcactgctgagggctttggattttcctttatgaactactgaaatgaggtcaacttgactattactaagggacattttgctacaaagaatgttagttttgccaattccctttccaaatctaaaatttattttaaccaggattttagatgtaaacatcaagtagttttggttgtttcaatgaagtaacatgtttaagctcacattatttgaagtacttcagttcctattgccatgaaaattgtatccagcagctaaaaaaaaaaaaaaaaaaaaagactacagttagtcattatccaatttgatgatttatggtccaacactaatgctcattttttttgtttgttttacaaacatttggtggataccacaatgaaaactgcacttaaaaaacaaaaatgctgaaagaggaaggaaatatcaaaaaggtctgaatagacaacaggcaaatatggtgagtggtcattgagatgttttaaaagttacagcaaaaggacttctaaaacaattttaggaaaagctttgtcatgaaaattcatttctttggaaatactgtagtttgtacttaatgacactgtcagcacatttctaggcaatacaaactcttgaggctaaatcctcatcctgacatgacagtgcaagcctgtcaaaatgtgaccccaaaaccaggtgtccttttgctccattatttatatctgtaaacctgttattattttcagaattcagaaaggcctaagaaaattacatctatgataataaagtgtatttctttgtc

SEQ ID NO: 4220 - protein, 87 aa, Homosapiens [sequence omitted]

SEQ ID NO: 4221 - DNA, 2933 bp, Homosapiens
gtccaccatcccagagggtgcctgccctgactggcacaactgcatccaacaatgacttggcgagtctttttgagtgtccagtctgctttgactatgtgttaccgcccattcttcaatgtcagagtggccatcttgtttgtagcaactgtcgcccaaagctcacatgttgtccaacttgccggggccctttgggatccattcgcaacttggctatggagaaagtggctaattcagtacttttcccctgtaaatatgcgtcttctggatgtgaaataactctgccacacacagaaaaagcagaccatgaagagctctgtgagtttaggccttattcctgtccgtgccctggtgcttcctgtaaatggcaaggctctctggatgctgtaatgccccatctgatgcatcagcataagtccattacaaccctacagggagaggatatagtttttcttgctacagacattaatcttcctggtgctgttgactgggtgatgatgcagtcctgttttggctttcacttcatgttagtcttagagaaacaggaaaaatacgatggtcaccagcagttcttcgcaatcgtacagctgataggaacacgcaagcaagctgaaaattttgcttaccgacttgagctaaatggtcataggcgacgattgacttgggaagcgactcctcgatctattcatgaaggaattgcaacagccattatgaatagcgactgtctagtctttgacaccagcattgcacagctttttgcagaaaatggcaatttaggcatcaatgtaactatttccatgtgttgaaatggcaatcaaacattttctggccagtgtttaaaacttcagtttcacagaaaataaggcacccatctgtctgccaacctaaaactctttcggtaggtggaagctagacacatgaagctgctggatacaattttcatggcaataggaactgaagtacttcaaataatgtgagcttaaacatgttacttcattgaaacaaccaaaactacttgatgtttacatctaaaatcctggttaaaataaattttagatttggaaagggaattggcaaaactaacattctttgtagcaaaatgtcccttagtaatagtcaagttgacctcatttcagtagttcataaaggaaaatccaaagccctcagcagtgaattacctggccacatagctgattttggtcactgtgaatgcagaccaatcacctagtactggaagctcacagtggtagacatcactatcacagtactttacggtcatggatttctcgtgaactatttcaggaacaatcacaaagatgacattcttcactgtatttgcatttgtaaccaccaagcaagtaaggatctctgccccagatgcatggtttgaggtaaggttcacagggaccactaaaggggcagagccaagtaaaaacatggatgtctccagtggacagtgtaggatttcttgataagcaaagcacctaaagcttttagttttaatacttgagaagttttaaaaacccatgcataaaacgtggaataccggtaaaatacacatatccctaagtctagtttaaactaaaatttctagagttaataattttcaataaaaaaatccagcttattttgatacaaggggtctttgggtaacatcttaaaaatcaatgctagaaaatgctcaacatcactagtcattagggacatagaatcaaaatacgtcacacccatttggagggctattataaaaaacccagaaaatgagtgctggcaaggatgtggagaaactggaacatttgtgcattgctggaaggaatgtcaaatggtgcagctgcggtggaaaagtttggcagttctcaaaaagttaaacagaattatcctgttgtcttagtcatttgtgttaaccgtaacagaatacctgagactgggtaatttaaaagtacgaatttatttctcatagttgtgaagactgagaagcccacgatcagcgtgctggcagactggtatcatctattgagggcccagtctcagcttctaggacggggcctgttgctgtgtcctcatatggtggaagggaatcgaagggcaaaaaggaggtaattggttcccttgagcccctttataaaggcactaaatccattaatgaggatggagctctcatgacataatcacctcctaaagcctcacctatcacgttggtggttgcttcaacatacgaatttggtggggggacattcagaccttagcatatgtgatctagtagttctgctcctggatatgtatccctaaaggacctaagaagggacttcaagagagatgtgtacacccatgttcatagcattactcataatacccaagagggggaaacaatcagcagatgagtggataaaccaaatgcggtctatggatatagtggtgtattatttggccataaaaatttctggtacttgctaccacatggctttttcccagggaaagtattagtttttgtttgacaaaacaccttgataggtcatggttctgcaaggcagagatgtgaaacaaagaaagctaactgttgcaaataataaaaagttggagttcctttgagctaaagctaaagtggcaaaggaggaagaggttcatccctacccttctgcaccccattattttgaagaaaaagagtggcctgaccctccagatctttcttttctggaggacactgggcgaaaagtagttgccccagtgactgttcgagcagttgatggcttgctaagtaagaatgctaaacacaaaaggacaactcttgtttgatcccactcatatgaagggaaattcagaaagaaagtgaaatagtggttaccagggtctggggtgagggtggaatttggagctctttttcagtgggtacagagtttcagtttgtggtgataaaaaatgcatgtaagccgggtgtg

SEQ ID NO: 4222 - protein, 196 aa, Homosapiens
MEKVANSVLFPCKYASSGCEITLPHTEKADHEELCEFRPYSCPCPGASCKWQGSLDAVMPHLMHQHKSITTLQGEDIVFLATDINLPGAVDWVMMQSCFGFHFMLVLEKQEKYDGHQQFFAIVQLIGTRKQAENFAYRLELNGHRRRLTWEATPRSIHEGIATAIMNSDCLVFDTSIAQLFAENGNLGINVTISMC

SEQ ID NO: 4223 - DNA, 3018 bp, Homosapiens
tatgttgaagcaaccaccaacgtgataggtgaggctttaggaggtgattatgtcatgagagctccatcctcattaatggatttagtgcctttataaaggggctcaagggaaccaattacctcctttttgcccttcgattcccttccaccatatgaggacacagcaacaggccccgtcctagaagctgagactgggccctcaatagatgataccagtctgccagcacgctgatcgtgggcttctcagtcttcacaactatgagaaataaattcgtacttttaaattacccagtctcaggtattctgttacggttaacacaaatgactaagacaacaggataattctgtttaactttttgagaactgccaaacttttccaccgcagctgcaccatttgacattccttccagcaatgcacaaatgttccagtttctccacatccttgccagcactcattttctgggttttttataatagccctccaaatgggtgtgacgtattttgattctatgtccctaatgactagtgatgttgagcattttctagcattgatttttaagatgttacccaaagaccccttgtatcaaaataagctggatttttttattgaaaattattaactctagaaattttagtttaaactagacttagggatatgtgtattttaccggtattccacgttttatgcatgggtttttaaaacttctcaagtattaaaactaaaagctttaggtgctttgcttatcaagaaatcctacactgtccactggagacatccatgtttttacttggctctgcccctttagtggtccctgtgaaccttacctcaaaccatgcatctggggcagagatccttacttgcttggtggttacaaatgcaaatacagtgaagaatgtcatctttgtgattgttcctgaaatagttcacgagaaatccatgaccgtaaagtactgtgatagtgatgtctaccactgtgagcttccagtactaggtgattggtctgcattcacagtgaccaaaatcagctatgtggccaggtaattcactgctgagggctttggattttcctttatgaactactgaaatgaggtcaacttgactattactaagggacattttgctacaaagaatgttagttttgccaattccctttccaaatctaaaatttattttaaccaggattttagatgtaaacatcaagtagttttggttgtttcaatgaagtaacatgtttaagctcacattatttgaagtacttcagttcctattgccatgaaaattgtatccagcagctaaaaaaaaaaaaaaaaaaaaagactacagttagtcattatccaatttgatgatttatggtccaacactaatgctcattttttttgtttgttttacaaacatttggtggataccacaatgaaaactgcacttaaaaaacaaaaatgctgaaagaggaaggaaatatcaaaaaggtctgaatagacaacaggcaaatatgcttccacctaccgaaagagttttaggttggcagacagatgggtgccttattttctgtgaaactgaagttttaaacactggccagaaaatgtttgattgccatttcaacacatggaaatagttacattgatgcctaaattgccattttctgcaaaaagctgtgcaatgctggtgtcaaagactagacagtcgctattcataatggctgttgcaattccttcatgaatagatcgaggagtcgcttcccaagtcaatcgtcgcctatgaccatttagctcaagtcggtaagcaaaattttcagcttgcttgcgtgttcctatcagctgtacgattgcgaagaactgctggtgaccatcgtatttttcctgtttctctaagactaacatgaagtgaaagccaaaacaggactgcatcatcacccagtcaacagcaccaggaagattaatgtctgtagcaagaaaaactatatcctctccctgtagggttgtaatggacttatgctgatgcatcagatggggcattacagcatccagagagccttgccatttacaggaagcaccagggcacggacaggaataaggcctaaactcacagagctcttcatggtctgctttttctgtgtgtggcagagttatttcacatccagaagacgcatatttacaggggaaaagtactgaattagccactttctccatagccaagttgcgaatggatcccaaagggccccggcaagttggacaacatgtgagctttgggcgacagttgctacaaacaagatggccactctgacattgaagaatgggcggtaacacatagtcaaagcagactggacactcaaaaagactcgccaagtcattgttggatgcagttgtgccagtcagggcaggcaccctctgggatggtggacacttcgaggtaccggtaggtaatgctgtagcagtctgacggctcatttctgaaataaatacataaggaggcaggagaaaaataattataaccatgacttactttataaataatgtttacatgccataagtccttttaaagtttcatacaaaatttactgagcaaaagaggaagaaaaataggattaaaaaagatattaaaaaaataaaattacactgaatgtgcactttattaggatctgtacactggataagctctcttttcaaaatgttccggaaaacatgtggaactcccttaatcgtctttggatagactacatagaataataaatgctaaaatagaaaatggaccataaacaactaaagaaactatacaaggaactgaagtttaatcgaatccgttttgctaggactctccctgaggctcccttactctatttctttctaatttggagtcagctgttgataggtacagggagttacaggtgaactcctgtataaaatcggcactctgtatccacacggtctgcatccgaggacttcaccagccatggattgaaaatattcagaaaaatttataaagaatacaaaatttttaaaatacagtctataacaactattt

SEQ ID NO: 4224 - protein, 40 aa, Homosapiens
MLPPTERVLGWQTDGCLIFCETEVLNTGQKMFDCHFNTWK

SEQ ID NO: 4225 - DNA, 2350 bp, Homosapiens
cccttgtatcaaaataagctggatttttttattgaaaattattaactctagaaattttagtttaaactagacttagggatatgtgtattttaccggtattccacgttttatgcatgggtttttaaaacttctcaagtattaaaactaaaagctttaggtgctttgcttatcaagaaatcctacactgtccactggagacatccatgtttttacttggctctgcccctttagtggtccctgtgaaccttacctcaaaccatgcatctggggcagagatccttacttgcttggtggttacaaatgcaaatacagtgaagaatgtcatctttgtgattgttcctgaaatagttcacgagaaatccatgaccgtaaagtactgtgatagtgatgtctaccactgtgagcttccagtactaggtgattggtctgcattcacagtgaccaaaatcagctatgtggccaggtaattcactgctgagggctttggattttcctttatgaactactgaaatgaggtcaacttgactattactaagggacattttgctacaaagaatgttagttttgccaattccctttccaaatctaaaatttattttaaccaggattttagatgtaaacatcaagtagttttggttgtttcaatgaagtaacatgtttaagctcacattatttgaagtacttcagttcctattgccatgaaaattgtatccagcagctaaaaaaaaaaaaaaaaaaaaagactacagttagtcattatccaatttgatgatttatggtccaacactaatgctcattttttttgtttgttttacaaacatttggtggataccacaatgaaaactgcacttaaaaaacaaaaatgctgaaagaggaaggaaatatcaaaaaggtctgaatagacaacaggcaaatatgcttccacctaccgaaagagttttaggttggcagacagatgggtgccttattttctgtgaaactgaagttttaaacactggccagaaaatgtttgattgccatttcaacacatggaaatagttacattgatgcctaaattgccattttctgcaaaaagctgtgcaatgctggtgtcaaagactagacagtcgctattcataatggctgttgcaattccttcatgaatagatcgaggagtcgcttcccaagtcaatcgtcgcctatgaccatttagctcaagtcgactaacatgaagtgaaagccaaaacaggactgcatcatcacccagtcaacagcaccaggaagattaatgtctgtagcaagaaaaactatatcctctccctgtagggttgtaatggacttatgctgatgcatcagatggggcattacagcatccagagagccttgccatttacaggaagcaccagggcacggacaggaataaggcctaaactcacagagctcttcatggtctgctttttctgtgtgtggcagagttatttcacatccagaagacgcatatttacaggggaaaagtactgaattagccactttctccatagccaagttgcgaatggatcccaaagggccccggcaagttggacaacatgtgagctttgggcgacagttgctacaaacaagatggccactctgacattgaagaatgggcggtaacacatagtcaaagcagactggacactcaaaaagactcgccaagtcattgttggatgcagttgtgccagtcagggcaggcaccctctgggatggtggacacttcgaggtaccggtaggtaatgctgtagcagtctgacggctcatttctgaaataaatacataaggaggcaggagaaaaataattataaccatgacttactttataaataatgtttacatgccataagtccttttaaagtttcatacaaaatttactgagcaaaagaggaagaaaaataggattaaaaaagatattaaaaaaataaaattacactgaatgtgcactttattaggatctgtacactggataagctctcttttcaaaatgttccggaaaacatgtggaactcccttaatcgtctttggatagactacatagaataataaatgctaaaatagaaaatggaccataaacaactaaagaaactatacaaggaactgaagtttaatcgaatccgttttgctaggactctccctgaggctcccttactctatttctttctaatttggagtcagctgttgataggtacagggagttacaggtgaactcctgtataaaatcggcactctgtatccacacggtctgcatccgaggacttcaccagccatggattgaaaatattcagaaaaatttataaagaatacaaaatttttaaaatacagtctataacaactattt

SEQ ID NO: 4226 - protein, 40 aa, Homosapiens; identical to SEQ ID NO: 4224

SEQ ID NO: 4227 - DNA, 2397 bp, Homosapiens
agtaactcttgagctggctcagggagcgcacttccttctcagccagcgcgtcgccccctgcatccgtggcctccactggagctgggcaggaccctacccagtgaatctggagaaaacaaacttgggagacagacgaaagcttagggcacattggaggacagcgcagctgtggctcccatttttggagatgcagtcgaatttgagctcacagggaggtgtggttgcctcctggggatggaaaggcttcctttctccacctctgtaactggtgcttctgagaagtaaatggtatttggatcctgacctcagacgcgaatttgggtcttctgtgcttaggagcagaaagagcccaggaggggcctgttcctttacttcttgggggaaacgcaatgcgtggcctgacttctcatgacgggaaaggctactccaccttctctgtactcctggaggggagtcttgttcacatgtttaccagcggccaggacaaggaaaaaaaaaaaaaaagattatgactgctacagcattacctaccggtacctcgaagtgtccaccatcccagagggtgcctgccctgactggcacaactgcatccaacaatgacttggcgagtctttttgagtgtccagtctgctttgactatgtgttaccgcccattcttcaatgtcagagtggccatcttgtttgtagcaactgtcgcccaaagctcacatgttgtccaacttgccggggccctttgggatccattcgcaacttggctatggagaaagtggctaattcagtacttttcccctgtaaatatgcgtcttctggatgtgaaataactctgccacacacagaaaaagcagaccatgaagagctctgtgagtttaggccttattcctgtccgtgccctggtgcttcctgtaaatggcaaggctctctggatgctgtaatgccccatctgatgcatcagcataagtccattacaaccctacagggagaggatatagtttttcttgctacagacattaatcttcctggtgctgttgactgggtgatgatgcagtcctgttttggctttcacttcatgttagtcttagagaaacaggaaaaatacgatggtcaccagcagttcttcgcaatcgtacagctgataggaacacgcaagcaagctgaaaattttgcttaccgacttgagctaaatggtcataggcgacgattgacttgggaagcgactcctcgatctattcatgaaggaattgcaacagccattatgaatagcgactgtctagtctttgacaccagcattgcacagctttttgcagaaaatggcaatttaggcatcaatgtaactatttccatgtgttgaaatggcaatcaaacattttctggccagtgtttaaaacttcagtttcacagaaaataaggcacccatctgtctgccaacctaaaactctttcggtaggtggaagctagacacatgaaggtaaataaaaagaaaggctgttaaatacaggaaacagttgcatgtagtaacactaatatatttaaaaataagtcaacagtaaaccactgaaaaaatatatgtatatacacccaagatgggcatcttttgtattaagaaaggaagcattgtaaaataattctgagttttgtgtttgttgtagattgattgtattgttgaaaaagtttgtttttgcgtgggagtgtgtgcctgcgtgggtgtgtgcgtgtttgggtttttttcctttaactgacaagccatcttgagtggtcatgggccactgcttttccctttgtgagtcaatacatagtgctgctgtgtgctttttttgtgtgtatttgctaatttttattaattttagtttttcattaaataaatttgacttttctgtaattcaggtttttcctttttttgtaccattttaaagttagtatcttttgatatgcatatttgtttatggtaaaaaatttataacgtgttcaatattttcttttcccccattaatcagttcattagaaatattttaaaatcagctattttgtgaagccatgagttccagaaagtaaaggtgacatcggaaaaataatcaaaagctatttaaagcatctataaggtgctctctttctgtcttctacagatgagtcacacctttgagcttaatctttgaaaggttagagaataaattgatttttataaatactgcaaatcaggcttttgtttcctttttcagatatcttggacaaatcacatattttaaaatttgttcttgtatttattggttttgcagaagaaggcatcgtcatgcacagtatttgtaattaaaagcaaatcatttgtttaaaaaggcagtttgcaaaaaatgtttttggtcttttataattctcattaaaagaatatctggcaaattaaaaaaa

SEQ ID NO: 4228 - protein, 279 aa, Homosapiens
MTATALPTGTSKCPPSQRVPALTGTTASNNDLASLFECPVCFDYVLPPILQCQSGHLVCSNCRPKLTCCPTCRGPLGSIRNLAMEKVANSVLFPCKYASSGCEITLPHTEKADHEELCEFRPYSCPCPGASCKWQGSLDAVMPHLMHQHKSITTLQGEDIVFLATDINLPGAVDWVMMQSCFGFHFMLVLEKQEKYDGHQQFFAIVQLIGTRKQAENFAYRLELNGHRRRLTWEATPRSIHEGIATAIMNSDCLVFDTSIAQLFAENGNLGINVTISMC

SEQ ID NO: 4229 - DNA, 2401 bp, Homosapiens
gcagtaactcttgagctggctcagggagcgcacttccttctcagccagcgcgtcgccccctgcatccgtggcctccactggagctgggcaggaccctacccagtgaatctggagaaaacaaacttgggagacagacgaaagcttagggcacattggaggacagcgcagctgtggctcccatttttggagatgcagtcgaatttgagctcacagggaggtgtggttgcctcctggggatggaaaggcttcctttctccacctctgtaactggtgcttctgagaagtaaatggtatttggatcctgacctcagacgcgaatttgggtcttctgtgcttaggagcagaaagagcccaggaggggcctgttcctttacttcttgggggaaacgcaatgcgtggcctgacttctcatgacgggaaaggctactccaccttctctgtactcctggaggggagtcttgttcacatgtttaccagcggccaggacaaggaagagaaaagaaatgagccgtcagactgctacagcattacctaccggtacctcgaagtgtccaccatcccagagggtgcctgccctgactggcacaactgcatccaacaatgacttggcgagtctttttgagtgtccagtctgctttgactatgtgttaccgcccattcttcaatgtcagagtggccatcttgtttgtagcaactgtcgcccaaagctcacatgttgtccaacttgccggggccctttgggatccattcgcaacttggctatggagaaagtggctaattcagtacttttcccctgtaaatatgcgtcttctggatgtgaaataactctgccacacacagaaaaagcagaccatgaagagctctgtgagtttaggccttattcctgtccgtgccctggtgcttcctgtaaatggcaaggctctctggatgctgtaatgccccatctgatgcatcagcataagtccattacaaccctacagggagaggatatagtttttcttgctacagacattaatcttcctggtgctgttgactgggtgatgatgcagtcctgttttggctttcacttcatgttagtcttagagaaacaggaaaaatacgatggtcaccagcagttcttcgcaatcgtacagctgataggaacacgcaagcaagctgaaaattttgcttaccgacttgagctaaatggtcataggcgacgattgacttgggaagcgactcctcgatctattcatgaaggaattgcaacagccattatgaatagcgactgtctagtctttgacaccagcattgcacagctttttgcagaaaatggcaatttaggcatcaatgtaactatttccatgtgttgaaatggcaatcaaacattttctggccagtgtttaaaacttcagtttcacagaaaataaggcacccatctgtctgccaacctaaaactctttcggtaggtggaagctagacacatgaaggtaaataaaaagaaaggctgttaaatacaggaaacagttgcatgtagtaacactaatatatttaaaaataagtcaacagtaaaccactgaaaaaatatatgtatatacacccaagatgggcatcttttgtattaagaaaggaagcattgtaaaataattctgagttttgtgtttgttgtagattgattgtattgttgaaaaagtttgtttttgcgtgggagtgtgtgcctgcgtgggtgtgtgcgtgtttgggtttttttcctttaactgacaagccatcttgagtggtcatgggccactgcttttccctttgtgagtcaatacatagtgctgctgtgtgctttttttgtgtgtatttgctaatttttattaattttagtttttcattaaataaatttgacttttctgtaattcaggtttttcctttttttgtaccattttaaagttagtatcttttgatatgcatatttgtttatggtaaaaaatttataacgtgttcaatattttcttttcccccattaatcagttcattagaaatattttaaaatcagctattttgtgaagccatgagttccagaaagtaaaggtgacatcggaaaaataatcaaaagctatttaaagcatctataaggtgctctctttctgtcttctacagatgagtcacacctttgagcttaatctttgaaaggttagagaataaattgatttttataaatactgcaaatcaggcttttgtttcctttttcagatatcttggacaaatcacatattttaaaatttgttcttgtatttattggttttgcagaagaaggcatcgtcatgcacagtatttgtaattaaaagcaaatcatttgtttaaaaaggcagtttgcaaaaaatgtttttggtcttttataattctcattaaaagaatatctggcaaattaaaaaaa

SEQ ID NO: 4230 - protein, 313 aa, Homosapiens; identical to SEQ ID NO: 602

SEQ ID NO: 4231 - DNA, 2330 bp, Homosapiens
ctttgttgtggagggtcccggggtgtgcggccaacatggcggaggtcagctgagtgcgggcagctgccggggccctgccctccctccccctcctccccgcggcgcccggaggcccgggccgcaccgcgccgctcggcgggcctcggcctccgctctctgcccccgacccccggctggagccgtccgggacggggctgcgctcttcctgccgcttcggccggaggcttcattgtgcagtgggaagaatgcagcctcctcccttgtttatgtcgttagagaggagagcgcgtgaacggcgtgccggggaagctctagcttattataaacctggcatttcctagggttcatttgccgggtagtttggggtcctttcttaactctcccaaatttataacttaaagtgaataacctgggccactccgatgcgtagaaatgagccgtcagactgctacagcattacctaccggtacctcgaagtgtccaccatcccagagggtgcctgccctgactggcacaactgcatccaacaatgacttggcgagtctttttgagtgtccagtctgctttgactatgtgttaccgcccattcttcaatgtcagagtggccatcttgtttgtagcaactgtcgcccaaagctcacatgttgtccaacttgccggggccctttgggatccattcgcaacttggctatggagaaagtggctaattcagtacttttcccctgtaaatatgcgtcttctggatgtgaaataactctgccacacacagaaaaagcagaccatgaagagctctgtgagtttaggccttattcctgtccgtgccctggtgcttcctgtaaatggcaaggctctctggatgctgtaatgccccatctgatgcatcagcataagtccattacaaccctacagggagaggatatagtttttcttgctacagacattaatcttcctggtgctgttgactgggtgatgatgcagtcctgttttggctttcacttcatgttagtcttagagaaacaggaaaaatacgatggtcaccagcagttcttcgcaatcgtacagctgataggaacacgcaagcaagctgaaaattttgcttaccgacttgagctaaatggtcataggcgacgattgacttgggaagcgactcctcgatctattcatgaaggaattgcaacagccattatgaatagcgactgtctagtctttgacaccagcattgcacagctttttgcagaaaatggcaatttaggcatcaatgtaactatttccatgtgttgaaatggcaatcaaacattttctggccagtgtttaaaacttcagtttcacagaaaataaggcacccatctgtctgccaacctaaaactctttcggtaggtggaagctagacacatgaaggtaaataaaaagaaaggctgttaaatacaggaaacagttgcatgtagtaacactaatatatttaaaaataagtcaacagtaaaccactgaaaaaatatatgtatatacacccaagatgggcatcttttgtattaagaaaggaagcattgtaaaataattctgagttttgtgtttgttgtagattgattgtattgttgaaaaagtttgtttttgcgtgggagtgtgtgcctgcgtgggtgtgtgcgtgtttgggtttttttcctttaactgacaagccatcttgagtggtcatgggccactgcttttccctttgtgagtcaatacatagtgctgctgtgtgctttttttgtgtgtatttgctaatttttattaattttagtttttcattaaataaatttgacttttctgtaattcaggtttttcctttttttgtaccattttaaagttagtatcttttgatatgcatatttgtttatggtaaaaaatttataacgtgttcaatattttcttttcccccattaatcagttcattagaaatattttaaaatcagctattttgtgaagccatgagttccagaaagtaaaggtgacatcggaaaaataatcaaaagctatttaaagcatctataaggtgctctctttctgtcttctacagatgagtcacacctttgagcttaatctttgaaaggttagagaataaattgatttttataaatactgcaaatcaggcttttgtttcctttttcagatatcttggacaaatcacatattttaaaatttgttcttgtatttattggttttgcagaagaaggcatcgtcatgcacagtatttgtaattaaaagcaaatcatttgtttaaaaaggcagtttgcaaaaaatgtttttggtcttttataattctcattaaaagaatatctggcaaattaaaaaaa

SEQ ID NO: 4232 - protein, 36 aa, Homosapiens
MRRNEPSDCYSITYRYLEVSTIPEGACPDWHNCIQQ

SEQ ID NO: 4233 - DNA, 2149 bp, Homosapiens
cgcagtgtgtggtatttagcgggggcgcgcggcgggctcgaggacgcgcgaaacggcggcggcggcggcggccaggggggagccggggcggccgttgcggggcgcgctctcgagaggcggcggcggcccagggtgtcccgtcggtctcggcgccgggaagaggcggtggcgctgcccgcggtggcgggggttggcgacggagcgcgttggtgccaggaccggggtccgaggcgcgctctccgcccacagaaatgagccgtcagactgctacagcattacctaccggtacctcgaagtgtccaccatcccagagggtgcctgccctgactggcacaactgcatccaacaatgacttggcgagtctttttgagtgtccagtctgctttgactatgtgttaccgcccattcttcaatgtcagagtggccatcttgtttgtagcaactgtcgcccaaagctcacatgttgtccaacttgccggggccctttgggatccattcgcaacttggctatggagaaagtggctaattcagtacttttcccctgtaaatatgcgtcttctggatgtgaaataactctgccacacacagaaaaagcagaccatgaagagctctgtgagtttaggccttattcctgtccgtgccctggtgcttcctgtaaatggcaaggctctctggatgctgtaatgccccatctgatgcatcagcataagtccattacaaccctacagggagaggatatagtttttcttgctacagacattaatcttcctggtgctgttgactgggtgatgatgcagtcctgttttggctttcacttcatgttagtcttagagaaacaggaaaaatacgatggtcaccagcagttcttcgcaatcgtacagctgataggaacacgcaagcaagctgaaaattttgcttaccgacttgagctaaatggtcataggcgacgattgacttgggaagcgactcctcgatctattcatgaaggaattgcaacagccattatgaatagcgactgtctagtctttgacaccagcattgcacagctttttgcagaaaatggcaatttaggcatcaatgtaactatttccatgtgttgaaatggcaatcaaacattttctggccagtgtttaaaacttcagtttcacagaaaataaggcacccatctgtctgccaacctaaaactctttcggtaggtggaagctagacacatgaaggtaaataaaaagaaaggctgttaaatacaggaaacagttgcatgtagtaacactaatatatttaaaaataagtcaacagtaaaccactgaaaaaatatatgtatatacacccaagatgggcatcttttgtattaagaaaggaagcattgtaaaataattctgagttttgtgtttgttgtagattgattgtattgttgaaaaagtttgtttttgcgtgggagtgtgtgcctgcgtgggtgtgtgcgtgtttgggtttttttcctttaactgacaagccatcttgagtggtcatgggccactgcttttccctttgtgagtcaatacatagtgctgctgtgtgctttttttgtgtgtatttgctaatttttattaattttagtttttcattaaataaatttgacttttctgtaattcaggtttttcctttttttgtaccattttaaagttagtatcttttgatatgcatatttgtttatggtaaaaaatttataacgtgttcaatattttcttttcccccattaatcagttcattagaaatattttaaaatcagctattttgtgaagccatgagttccagaaagtaaaggtgacatcggaaaaataatcaaaagctatttaaagcatctataaggtgctctctttctgtcttctacagatgagtcacacctttgagcttaatctttgaaaggttagagaataaattgatttttataaatactgcaaatcaggcttttgtttcctttttcagatatcttggacaaatcacatattttaaaatttgttcttgtatttattggttttgcagaagaaggcatcgtcatgcacagtatttgtaattaaaagcaaatcatttgtttaaaaaggcagtttgcaaaaaatgtttttggtcttttataattctcattaaaagaatatctggcaaattaaaaaaa

SEQ ID NO: 4234 - protein, 282 aa, Homosapiens; identical to SEQ ID NO: 604

SEQ ID NO: 4235 - DNA, 3345 bp, Homosapiens
tttcacccccaagacaaatagtggcctgccattttccagcccaggtagcttcctgggaaaagttgcttgttttatctttgactcagcctggctagttacattgtcgattatttcttccagatgatatttacctgttaaataatgtttattactctgctgatgaatgttttcagcaacgctggagaaccctaggctgcaaggggttcttcacctgttgactccatcccccacccccagtatggcatatatctctgccgtgctatcatctttattctttcctttttcattgtctcttcctgactgtcctcctttgttcattatgtctgacacatattgtggattgaaagtagaacagaaagatatactttctctaccagactaaaaagttttgagatggccctccatttctcccatgcctcacttcaccttagttgtgtttttatttatttttatattttcgccaccttcactagcgagtacatcccctcactcttgaggtgggcactgatcagtaggaaataagattaatacctggctggtgataatttggggggaagacttaattagatagagatggataatgggatggcagcagacctttccccttgtgacccttcccctcatttccaaaatacacctctagagtagataattgcttaccattaagaagagttaatggaaggtgatactctgattctttggcattggaactacattcaatccgcggtatcctcggattagttctaggacccccttctccataccaaaacctgaggatgctcaagtccctgatagaaaatggtgtcatatttgtatgtgcatattctcttgtataatttaagtgatctctggattacttaatacaatgtaaacaatatgtaaatagttgttatagactgtattttaaaaattttgtattctttataaatttttctgaatattttcaatccatggctggtgaagtcctcggatgcagaccgtgtggatacagagtgccgattttatacaggagttcacctgtaactccctgtacctatcaacagctgactccaaattagaaagaaatagagtaagggagcctcagggagagtcctagcaaaacggattcgattaaacttcagttccttgtatagtttctttagttgtttatggtccattttctattttagcatttattattctatgtagtctatccaaagacgattaagggagttccacatgttttccggaacattttgaaaagagagcttatccagtgtacagatcctaataaagtgcacattcagtgtaattttatttttttaatatcttttttaatcctatttttcttcctcttttgctcagtaaattttgtatgaaactttaaaaggacttatggcatgtaaacattatttataaagtaagtcatggttataattatttttctcctgcctccttatgtatttatttcagaaatgagccgtcagactgctacagcattacctaccggtacctcgaagtgtccaccatcccagagggtgcctgccctgactggcacaactgcatccaacaatgacttggcgagtctttttgagtgtccagtctgctttgactatgtgttaccgcccattcttcaatgtcagagtggccatcttgtttgtagcaactgtcgcccaaagctcacatgttgtccaacttgccggggccctttgggatccattcgcaacttggctatggagaaagtggctaattcagtacttttcccctgtaaatatgcgtcttctggatgtgaaataactctgccacacacagaaaaagcagaccatgaagagctctgtgagtttaggccttattcctgtccgtgccctggtgcttcctgtaaatggcaaggctctctggatgctgtaatgccccatctgatgcatcagcataagtccattacaaccctacagggagaggatatagtttttcttgctacagacattaatcttcctggtgctgttgactgggtgatgatgcagtcctgttttggctttcacttcatgttagtcttagagaaacaggaaaaatacgatggtcaccagcagttcttcgcaatcgtacagctgataggaacacgcaagcaagctgaaaattttgcttaccgacttgagctaaatggtcataggcgacgattgacttgggaagcgactcctcgatctattcatgaaggaattgcaacagccattatgaatagcgactgtctagtctttgacaccagcattgcacagctttttgcagaaaatggcaatttaggcatcaatgtaactatttccatgtgttgaaatggcaatcaaacattttctggccagtgtttaaaacttcagtttcacagaaaataaggcacccatctgtctgccaacctaaaactctttcggtaggtggaagctagacacatgaaggtaaataaaaagaaaggctgttaaatacaggaaacagttgcatgtagtaacactaatatatttaaaaataagtcaacagtaaaccactgaaaaaatatatgtatatacacccaagatgggcatcttttgtattaagaaaggaagcattgtaaaataattctgagttttgtgtttgttgtagattgattgtattgttgaaaaagtttgtttttgcgtgggagtgtgtgcctgcgtgggtgtgtgcgtgtttgggtttttttcctttaactgacaagccatcttgagtggtcatgggccactgcttttccctttgtgagtcaatacatagtgctgctgtgtgctttttttgtgtgtatttgctaatttttattaattttagtttttcattaaataaatttgacttttctgtaattcaggtttttcctttttttgtaccattttaaagttagtatcttttgatatgcatatttgtttatggtaaaaaatttataacgtgttcaatattttcttttcccccattaatcagttcattagaaatattttaaaatcagctattttgtgaagccatgagttccagaaagtaaaggtgacatcggaaaaataatcaaaagctatttaaagcatctataaggtgctctctttctgtcttctacagatgagtcacacctttgagcttaatctttgaaaggttagagaataaattgatttttataaatactgcaaatcaggcttttgtttcctttttcagatatcttggacaaatcacatattttaaaatttgttcttgtatttattggttttgcagaagaaggcatcgtcatgcacagtatttgtaattaaaagcaaatcatttgtttaaaaaggcagtttgcaaaaaatgtttttggtcttttataattctcattaaaagaatatctggcaaatt

SEQ ID NO: 4236 - protein, 298 aa, Homosapiens
MVIIIFLLPPYVFISEMSRQTATALPTGTSKCPPSQRVPALTGTTASNNDLASLFECPVCFDYVLPPILQCQSGHLVCSNCRPKLTCCPTCRGPLGSIRNLAMEKVANSVLFPCKYASSGCEITLPHTEKADHEELCEFRPYSCPCPGASCKWQGSLDAVMPHLMHQHKSITTLQGEDIVFLATDINLPGAVDWVMMQSCFGFHFMLVLEKQEKYDGHQQFFAIVQLIGTRKQAENFAYRLELNGHRRRLTWEATPRSIHEGIATAIMNSDCLVFDTSIAQLFAENGNLGINVTISMC

SEQ ID NO: 4237 - DNA, 1878 bp, Homosapiens
gcagtaactcttgagctggctcagggagcgcacttccttctcagccagcgcgtcgccccctgcatccgtggcctccactggagctgggcaggaccctacccagtgaatctggagaaaacaaacttgggagacagacgaaagcttagggcacattggaggacagcgcagctgtggctcccatttttggagatgcagtcgaatttgagctcacagggaggtgtggttgcctcctggggatggaaaggcttcctttctccacctctgtaactggtgcttctgagaagtaaatggtatttggatcctgacctcagacgcgaatttgggtcttctgtgcttaggagcagaaagagcccaggaggggcctgttcctttacttcttgggggaaacgcaatgcgtggcctgacttctcatgacgggaaaggctactccaccttctctgtactcctggaggggagtcttgttcacatgtttaccagcggccaggacaaggaagagaaaagaaatgagccgtcagactgctacagcattacctaccggtacctcgaagtgtccaccatcccagagggtgcctgccctgactggcacaactgcatccaacaatgacttggcgagtctttttgagtgtccagtctgctttgactatgtgttaccgcccattcttcaatgtcagagtggccatcttgtttgtagcaactgtcgcccaaagctcacatgttgtccaacttgccggggccctttgggatccattcgcaacttggctatggagaaagtggctaattcagtacttttcccctgtaaatatgcgtcttctggatgtgaaataactctgccacacacagaaaaagcagaccatgaagagctctgtgagtttaggccttattcctgtccgtgccctggtgcttcctgtaaatggcaaggctctctggatgctgtaatgccccatctgatgcatcagcataagtccattacaaccctacagggagaggatatagtttttcttgctacagacattaatcttcctggtgctgttgactgggtgatgatgcagtcctgttttggctttcacttcatgttagtcttagagaaacaggaaaaatacgatggtcaccagcagttcttcgcaatcgtacagctgataggaacacgcaagcaagctgaaaattttgcttaccgacttgagctaaatggtcataggcgacgattgacttgggaagcgactcctcgatctattcatgaaggaattgcaacagccattatgaatagcgactgtctagtctttgacaccagcattgcacagctttttgcagaaaatggcaatttaggcatcaatgtaactatttccatgtgttgaaatggcaatcaaacattttctggccagtgtttaaaacttcagtttcacagaaaataaggcacccatctgtctgccaacctaaaactctttcggtaggtggaagctagacacatgaaggtaaataaaaagaaaggctgttaaatacaggaaacagttgcatgtagtaacactaatatatttaaaaataagtcaacagtaaaccactgaaaaaatatatgtatatacacccaagatgggcatcttttgtattaagaaaggaagcattgtaaaataattctgagttttgtgtttgttgtagattgattgtattgttgaaaaagtttgtttttgcgtgggagtgtgtgcctgcgtgggtgtgtgcgtgtttgggtttttttcctttaactgacaagccatcttgagtggtcatgggccactgcttttccctttgtgagtcaatacatagtgctgctgtgtgctttttttgtgtgtatttgctaatttttattaattttagtttttcattaaataaatttgacttttctgt

SEQ ID NO: 4238 - protein, 313 aa, Homosapiens; identical to SEQ ID NO: 602

SEQ ID NO: 4239 - DNA, 1807 bp, Homosapiens
ctttgttgtggagggtcccggggtgtgcggccaacatggcggaggtcagctgagtgcgggcagctgccggggccctgccctccctccccctcctccccgcggcgcccggaggcccgggccgcaccgcgccgctcggcgggcctcggcctccgctctctgcccccgacccccggctggagccgtccgggacggggctgcgctcttcctgccgcttcggccggaggcttcattgtgcagtgggaagaatgcagcctcctcccttgtttatgtcgttagagaggagagcgcgtgaacggcgtgccggggaagctctagcttattataaacctggcatttcctagggttcatttgccgggtagtttggggtcctttcttaactctcccaaatttataacttaaagtgaataacctgggccactccgatgcgtagaaatgagccgtcagactgctacagcattacctaccggtacctcgaagtgtccaccatcccagagggtgcctgccctgactggcacaactgcatccaacaatgacttggcgagtctttttgagtgtccagtctgctttgactatgtgttaccgcccattcttcaatgtcagagtggccatcttgtttgtagcaactgtcgcccaaagctcacatgttgtccaacttgccggggccctttgggatccattcgcaacttggctatggagaaagtggctaattcagtacttttcccctgtaaatatgcgtcttctggatgtgaaataactctgccacacacagaaaaagcagaccatgaagagctctgtgagtttaggccttattcctgtccgtgccctggtgcttcctgtaaatggcaaggctctctggatgctgtaatgccccatctgatgcatcagcataagtccattacaaccctacagggagaggatatagtttttcttgctacagacattaatcttcctggtgctgttgactgggtgatgatgcagtcctgttttggctttcacttcatgttagtcttagagaaacaggaaaaatacgatggtcaccagcagttcttcgcaatcgtacagctgataggaacacgcaagcaagctgaaaattttgcttaccgacttgagctaaatggtcataggcgacgattgacttgggaagcgactcctcgatctattcatgaaggaattgcaacagccattatgaatagcgactgtctagtctttgacaccagcattgcacagctttttgcagaaaatggcaatttaggcatcaatgtaactatttccatgtgttgaaatggcaatcaaacattttctggccagtgtttaaaacttcagtttcacagaaaataaggcacccatctgtctgccaacctaaaactctttcggtaggtggaagctagacacatgaaggtaaataaaaagaaaggctgttaaatacaggaaacagttgcatgtagtaacactaatatatttaaaaataagtcaacagtaaaccactgaaaaaatatatgtatatacacccaagatgggcatcttttgtattaagaaaggaagcattgtaaaataattctgagttttgtgtttgttgtagattgattgtattgttgaaaaagtttgtttttgcgtgggagtgtgtgcctgcgtgggtgtgtgcgtgtttgggtttttttcctttaactgacaagccatcttgagtggtcatgggccactgcttttccctttgtgagtcaatacatagtgctgctgtgtgctttttttgtgtgtatttgctaatttttattaattttagtttttcattaaataaatttgacttttctgt

SEQ ID NO: 4240 - protein, 36 aa, Homosapiens; identical to SEQ ID NO: 4232

SEQ ID NO: 4241 - DNA, 1626 bp, Homosapiens
cgcagtgtgtggtatttagcgggggcgcgcggcgggctcgaggacgcgcgaaacggcggcggcggcggcggccaggggggagccggggcggccgttgcggggcgcgctctcgagaggcggcggcggcccagggtgtcccgtcggtctcggcgccgggaagaggcggtggcgctgcccgcggtggcgggggttggcgacggagcgcgttggtgccaggaccggggtccgaggcgcgctctccgcccacagaaatgagccgtcagactgctacagcattacctaccggtacctcgaagtgtccaccatcccagagggtgcctgccctgactggcacaactgcatccaacaatgacttggcgagtctttttgagtgtccagtctgctttgactatgtgttaccgcccattcttcaatgtcagagtggccatcttgtttgtagcaactgtcgcccaaagctcacatgttgtccaacttgccggggccctttgggatccattcgcaacttggctatggagaaagtggctaattcagtacttttcccctgtaaatatgcgtcttctggatgtgaaataactctgccacacacagaaaaagcagaccatgaagagctctgtgagtttaggccttattcctgtccgtgccctggtgcttcctgtaaatggcaaggctctctggatgctgtaatgccccatctgatgcatcagcataagtccattacaaccctacagggagaggatatagtttttcttgctacagacattaatcttcctggtgctgttgactgggtgatgatgcagtcctgttttggctttcacttcatgttagtcttagagaaacaggaaaaatacgatggtcaccagcagttcttcgcaatcgtacagctgataggaacacgcaagcaagctgaaaattttgcttaccgacttgagctaaatggtcataggcgacgattgacttgggaagcgactcctcgatctattcatgaaggaattgcaacagccattatgaatagcgactgtctagtctttgacaccagcattgcacagctttttgcagaaaatggcaatttaggcatcaatgtaactatttccatgtgttgaaatggcaatcaaacattttctggccagtgtttaaaacttcagtttcacagaaaataaggcacccatctgtctgccaacctaaaactctttcggtaggtggaagctagacacatgaaggtaaataaaaagaaaggctgttaaatacaggaaacagttgcatgtagtaacactaatatatttaaaaataagtcaacagtaaaccactgaaaaaatatatgtatatacacccaagatgggcatcttttgtattaagaaaggaagcattgtaaaataattctgagttttgtgtttgttgtagattgattgtattgttgaaaaagtttgtttttgcgtgggagtgtgtgcctgcgtgggtgtgtgcgtgtttgggtttttttcctttaactgacaagccatcttgagtggtcatgggccactgcttttccctttgtgagtcaatacatagtgctgctgtgtgctttttttgtgtgtatttgctaatttttattaattttagtttttcattaaataaatttgacttttctgt

SEQ ID NO: 4242 - protein, 282 aa, Homosapiens; identical to SEQ ID NO: 604

SEQ ID NO: 4243 - DNA, 936 bp, Homosapiens
agtaactcttgagctggctcagggagcgcacttccttctcagccagcgcgtcgccccctgcatccgtggcctccactggagctgggcaggaccctacccagtgaatctggagaaaacaaacttgggagacagacgaaagcttagggcacattggaggacagcgcagctgtggctcccatttttggagatgcagtcgaatttgagctcacagggaggtgtggttgcctcctggggatggaaaggcttcctttctccacctctgtaactggtgcttctgagaagtaaatggtatttggatcctgacctcagacgcgaatttgggtcttctgtgcttaggagcagaaagagcccaggaggggcctgttcctttacttcttgggggaaacgcaatgcgtggcctgacttctcatgacgggaaaggctactccaccttctctgtactcctggaggggagtcttgttcacatgtttaccagcggccaggacaaggaagagaaaaggttacgtcatgacttctgcagggctgtccttggttcctactgcagggcgcctgtgtggttgggattccttttctgtttcaagatggagctgggttccacccttggagctttgagaggctttagcagttgctgtcctgtaatacctccgttcccaagaaataccgttcacatttcgcttctttttcacactttgaataggagttaaaatgtgctttctgtagtgtttggaaaatggcaaagatatattgtaatgtgagcccgaactgttgttgataaatgtataactattgctaggtcaagaaattgtgaacaacagtgttttgcttggtccgtagctatattgtgttaaatataaactgagtttactgcccttggatgtgattctttggtttgatttagtaatttgaaaggcattggttgactagactgttttttgc

SEQ ID NO: 4244 - protein, 104 aa, Homosapiens
MRGLTSHDGKGYSTFSVLLEGSLVHMFTSGQDKEEKRLRHDFCRAVLGSYCRAPVWLGFLFCFKMELGSTLGALRGFSSCCPVIPPFPRNTVHISLLFHTLNRS

SEQ ID NO: 4245 - DNA, 1681 bp, Homosapiens
gccgccctccattgtctccacggcggcgaggagcgccggcgagcgcagcccgggaccgagcggggcggcgcggctggcggggccggcggcggctgaagcgagagcgcgacgcgacgcgaccgcggcttcccgagctgcgcctggccgcccagcgccgcggcccgcccgaggcctggaggggtccgggccgccgtccatggtcgcggcgtcctgaggcgggggacgcgcccggcgcccccggccctcctccgcctcctcccgcggggcgggcggcctcctccggcgcctccccgcgcccgcccgccgctcgccgccgcctccctccctccttccctgcggctcccccggctttcggagcccgggggcggcctgtggcgcgcggagcccgcgccggactgcgcctctttggaccttgaggggaaacatgcgtttgccttggatcgtttgaaattctgagtttgggatccccgcccgcccgcctgcctcttccgccccgcgggttttttccttttttccttttgctttttttccttttctccctccgggtctcctttttgactccctccccctttatgctcgcccagccctccccctgctgctgagaagtgggggagggtctcggcctccaggttcccgccccaccggggcccgggcgagcatggggggcaagcagagcacggcggcccgctcccggggccccttcccgggggtctccaccgatgacagcgccgtgccgccgccgggaggggcgccccatttcgggcactaccggacgggcggcggggccatggggctgcgcagccgctcggtcagctcggtggcaggcatgggcatggaccccagcacggccgggggggtgccctttggcctctacacccccgcctcccggggcaccggcgactccgagagggcgcccggcggcggagggtctgcgtccgactccacctatgcccatggcaatggttaccaggagacgggcggcggtcaccatagagacgggatgctgtacctgggctcccgagcctcgctggcggatgctctacctctgcacatcgcacccaggtggttcagctcgcatagtggtttcaagtgccccatttgctccaagtctgtggcttctgacgagatggaaatgcactttataatgtgtttgagcaaacctcgcctctcctacaacgatgatgtgctgactaaagacgcgggtgagtgtgtgatctgcctggaggagctgctgcagggggacacgatagccaggctgccctgcctgtgcatctatcacaaaagctgcatagactcgtggtttgaagtgaacagatcttgtccggaacaccctgcggactgacctgcgggcttgcttgctgactcctctcaaagggacagagcgcccctgctccagggaggaggctcaccggaccctggggcagagctgagcttgggacaccagcgggaacagggcaccccttctgcactgacttccagatcatggttctcccttcctccctgaggacaccaaattggatgagagcaagtttgagagaagaatgaatcaactgctatccttcccctcacccctcagcccaggagggaaagggcattttctttttcatctttgaaaggcattgtgggtctgtctttaaagtgtttacaaaaaaaaattatataaaaaaaaagtctagtgtcg

SEQ ID NO: 4246 - protein, 227 aa, Homosapiens; identical to SEQ ID NO: 606

SEQ ID NO: 4247 - DNA, 1576 bp, Homosapiens
gccgccctccattgtctccacggcggcgaggagcgccggcgagcgcagcccgggaccgagcggggcggcgcggctggcggggccggcggcggctgaagcgagagcgcgacgcgacgcgaccgcggcttcccgagctgcgcctggccgcccagcgccgcggcccgcccgaggcctggaggggtccgggccgccgtccatggtcgcggcgtcctgaggcgggggacgcgcccggcgcccccggccctcctccgcctcctcccgcggggcgggcggcctcctccggcgcctccccgcgcccgcccgccgctcgccgccgcctccctccctccttccctgcggctcccccggctttcggagcccgggggcggcctgtggcgcgcggagcccgcgccggactgcgcctctttggaccttgaggggaaacatgcgtttgccttggatcgtttgaaattctgagtttgggatccccgcccgcccgcctgcctcttccgccccgcgggttttttccttttttccttttgctttttttccttttctccctccgggtctcctttttgactccctccccctttatgctcgcccagccctccccctgctgctgagaagtgggggagggtctcggcctccaggttcccgccccaccggggcccgggcgagcatggggggcaagcagagcacggcggcccgctcccggggccccttcccgggggtctccaccgatgacagcgccgtgccgccgccgggaggggcgccccatttcgggcactaccggacgggcggcggggccatggggctgcgcagccgctcggtcagctcggtggcaggcatgggcatggaccccagcacggccgggggggtgccctttggcctctacacccccgcctcccggggcaccggcgactccgagagggcgcccggcggcggagggtctgcgtccgactccacctatgcccatggcaatggttaccaggagacgggcggcggtcaccatagagacgggatgctgtacctgggctcccgagcctcgctggcggatgctctacctctgcacatcgcacccaggtggttcagctcgcatagtggtttcaagtgccccatttgctccaagtctgtggcttctgacgagatggaaatgcactttataatgtgtttgagcaaacctcgcctctcctacaacgatgatgtgctgactaaagacgcgggtgagtgtgtgatctgcctggaggagctgctgcagggggacacgatagccaggctgccctgcctgtgcatctatcacaaaagctgcatagactcgtggtttgaagtgaacagatcttgtccggaacaccctgcggactgacctgcgggcttgcttgctgactcctctcaaagatcatggttctcccttcctccctgaggacaccaaattggatgagagcaagtttgagagaagaatgaatcaactgctatccttcccctcacccctcagcccaggagggaaagggcattttctttttcatctttgaaaggcattgtgggtctgtctttaaagtgtttacaaaaaaaaattatataaaaaaaaagtctagtgtcg

SEQ ID NO: 4248 - protein, 227 aa, Homosapiens; identical to SEQ ID NO: 606

SEQ ID NO: 4249 - DNA, 2353 bp, Homosapiens
gccgccctccattgtctccacggcggcgaggagcgccggcgagcgcagcccgggaccgagcggggcggcgcggctggcggggccggcggcggctgaagcgagagcgcgacgcgacgcgaccgcggcttcccgagctgcgcctggccgcccagcgccgcggcccgcccgaggcctggaggggtccgggccgccgtccatggtcgcggcgtcctgaggcgggggacgcgcccggcgcccccggccctcctccgcctcctcccgcggggcgggcggcctcctccggcgcctccccgcgcccgcccgccgctcgccgccgcctccctccctccttccctgcggctcccccggctttcggagcccgggggcggcctgtggcgcgcggagcccgcgccggactgcgcctctttggaccttgaggggaaacatgcgtttgccttggatcgtttgaaattctgagtttgggatccccgcccgcccgcctgcctcttccgccccgcgggttttttccttttttccttttgctttttttccttttctccctccgggtctcctttttgactccctccccctttatgctcgcccagccctccccctgctgctgagaagtgggggagggtctcggcctccaggttcccgccccaccggggcccgggcgagcatggggggcaagcagagcacggcggcccgctcccggggccccttcccgggggtctccaccgatgacagcgccgtgccgccgccgggaggggcgccccatttcgggcactaccggacgggcggcggggccatggggctgcgcagccgctcggtcagctcggtggcaggcatgggcatggaccccagcacggccgggggggtgccctttggcctctacacccccgcctcccggggcaccggcgactccgagagggcgcccggcggcggagggtctgcgtccgactccacctatgcccatggcaatggttaccaggagacgggcggcggtcaccatagagacgggatgctgtacctgggctcccgagcctcgctggcggatgctctacctctgcacatcgcacccaggtggttcagctcgcatagtggtttcaagtgccccatttgctccaagtctgtggcttctgacgagatggaaatgcactttataatgtgtttgagcaaacctcgcctctcctacaacgatgatgtgctgactaaagacgcgggtgagtgtgtgatctgcctggaggagctgctgcagggggacacgatagccaggctgccctgcctgtgcatctatcacaaaagctgcatagactcgtggtttgaagtgaacagatcttgtccggaacaccctgcggactgacctgcgggcttgcttgctgactcctctcaaagggacagagcgcccctgctccagggaggaggctcaccggaccctggggcagagctgagcttgggacaccagcgggaacagggcaccccttctgcactgacttccagatcatggttctcccttcctccctgaggacaccaaattggatgagagcaagtttgagagaagaatgaatcaactgctatccttcccctcacccctcagcccaggagggaaagggcattttctttttcatctttgaaaggcattgtgggtctgtctttaaagtgtttacaaaaaaaaattatataaaaaaaaagtctagtgtcgactggtgttttccctcgtgatgtttacagcttgctgtttgctgcccagccataacccactcagtgacagacgaacacagctaaggcctcgctgccagccttctgacggcgggcgagcacacggtctcttcccctgccccaactggccctctccaccaccaacttctctactttgggtttgtttggttttttccctctatttttctggctggttttttgctcttttctccccttgagaccctaatatcttgacttcattgccaaaaaacaacccattgagaactttcttcctactgatcccatctcttttcccttctttcctcctggttccggtcagttcagaggatttaacaatcacaagtgtcctgcaaaaatgcctgaacattattcttaggccctcgtggattttttttttcagaaaacttaaacaaaaaaagacttactaagaaatatgtacagctacccctgttttcaggcactatgtttgagaacattttagccattgatgttcacacgtggcatcagcccatgcaagataggtttctgtatttatatattaaaatacaaaaaaaaacttataaaatgtttaaaaaaatgttcaaagcttgggagaaaagctttcttcattagtcaaggtgttttgatatggtattaaaatgtctaataaaagatg

SEQ ID NO: 4250 - protein, 227 aa, Homosapiens; identical to SEQ ID NO: 606

SEQ ID NO: 4251 - DNA, 4354 bp, Homosapiens
gccgccctccattgtctccacggcggcgaggagcgccggcgagcgcagcccgggaccgagcggggcggcgcggctggcggggccggcggcggctgaagcgagagcgcgacgcgacgcgaccgcggcttcccgagctgcgcctggccgcccagcgccgcggcccgcccgaggcctggaggggtccgggccgccgtccatggtcgcggcgtcctgaggcgggggacgcgcccggcgcccccggccctcctccgcctcctcccgcggggcgggcggcctcctccggcgcctccccgcgcccgcccgccgctcgccgccgcctccctccctccttccctgcggctcccccggctttcggagcccgggggcggcctgtggcgcgcggagcccgcgccggactgcgcctctttggaccttgaggggaaacatgcgtttgccttggatcgtttgaaattctgagtttgggatccccgcccgcccgcctgcctcttccgccccgcgggttttttccttttttccttttgctttttttccttttctccctccgggtctcctttttgactccctccccctttatgctcgcccagccctccccctgctgctgagaagtgggggagggtctcggcctccaggttcccgccccaccggggcccgggcgagcatggggggcaagcagagcacggcggcccgctcccggggccccttcccgggggtctccaccgatgacagcgccgtgccgccgccgggaggggcgccccatttcgggcactaccggacgggcggcggggccatggggctgcgcagccgctcggtcagctcggtggcaggcatgggcatggaccccagcacggccgggggggtgccctttggcctctacacccccgcctcccggggcaccggcgactccgagagggcgcccggcggcggagggtctgcgtccgactccacctatgcccatggcaatggttaccaggagacgggcggcggtcaccatagagacgggatgctgtacctgggctcccgagcctcgctggcggatgctctacctctgcacatcgcacccaggtggttcagctcgcatagtggtttcaagtgccccatttgctccaagtctgtggcttctgacgagatggaaatgcactttataatgtgtttgagcaaacctcgcctctcctacaacgatgatgtgctgactaaagacgcgggtgagtgtgtgatctgcctggaggagctgctgcagggggacacgatagccaggctgccctgcctgtgcatctatcacaaaagctgcatagactcgtggtttgaagtgaacagatcttgtccggaacaccctgcggactgacctgcgggcttgcttgctgactcctctcaaagggacagagcgcccctgctccagggaggaggctcaccggaccctggggcagagctgagcttgggacaccagcgggaacagggcaccccttctgcactgacttccagatcatggttctcccttcctccctgaggacaccaaattggatgagagcaagtttgagagaagaatgaatcaactgctatccttcccctcacccctcagcccaggagggaaagggcattttctttttcatctttgaaaggcattgtgggtctgtctttaaagtgtttacaaaaaaaaattatataaaaaaaaagtctagtgtcgactggtgttttccctcgtgatgtttacagcttgctgtttgctgcccagccataacccactcagtgacagacgaacacagctaaggcctcgctgccagccttctgacggcgggcgagcacacggtctcttcccctgccccaactggccctctccaccaccaacttctctactttgggtttgtttggttttttccctctatttttctggctggttttttgctcttttctccccttgagaccctaatatcttgacttcattgccaaaaaacaacccattgagaactttcttcctactgatcccatctcttttcccttctttcctcctggttccggtcagttcagaggatttaacaatcacaagtgtcctgcaaaaatgcctgaacattattcttaggccctcgtggattttttttttcagaaaacttaaacaaaaaaagacttactaagaaatatgtacagctacccctgttttcaggcactatgtttgagaacattttagccattgatgttcacacgtggcatcagcccatgcaagataggtttctgtatttatatattaaaatacaaaaaaaaacttataaaatgtttaaaaaaatgttcaaagcttgggagaaaagctttcttcattagtcaaggtgttttgatatggtattaaaatgtctaataaaagatggcactgcgtgattttattttaatgaagtgttatacaatcaagaaatgggggcaagggcctgccccccactccctcacctacctccttagcattccttcaggctgctactcggggctccaggtgtgtgaattggtcctcagatagtcaggcctgggtggagggagtggcaagtcaggcgtgcctcctacaagcttcctaacctcttaagcatcatggaaccagtcagccctctgtggagtcattgtgctggacctctgaaaagatctgcaggggccaagatgttgcagccaccggaggctgcaaggatgtgggttcttccaggtgtgggcccagcccccctccttccagcctttgctccccatcccacgttccactcgccctgcctgttgttcagtttgcgtctcagtgctgactcacgggcatgcttcattgaggcccaggaagaggccctggtttggggctgtgccagctcagagcccttgaaccagaaccaactgctcaggctcacaaaagttggcaaaatgcgggctgggcaggcagctcggggcagggagcagcagtgcaggcctggcctgtgtccccgtgcccagcgggctcccggagcagcattccagagcctcctgcagagccagcgaaggaaagctctagagggagacgactccaccgcctctctgctctgacccttctcaggcccgcctgatgtgctggaccatccccctgctgccacggcccctggctccgcagtcaccctccatcagatgcttccagaagcacctactctgtgcaagggcattcacaacaggccagtgggcaaacgtgagccagggccagcggagaaacactaaagaagactcggtggttcagagcctgggtctcagcgcgggacccgtctggggtgaagaccttggggctgttgtgagtcggtggcaggaacgtgggctctagactgtgcattcaggctctcctacttggcagaatgatcttggggaaacgacttcatctgaacttcagatatttcacatgtgaagcggggacaaaaccatgcagctcagaggtccctgtgggggctgggggagctgccctgcaggtcttggcacatgcacagcaggctccccatagctttgtcaccacaaagggcactgttctattcacagcacctcctgcttctgcctggcaactgtgtctccctgtgctatatttaattccaccagcaaagctggcgaggcagggcccagccctgaaggagatctccttgcctgacccctggacctggaaatggaggcttcatgtgcccgccttggcggcttaagcctgctgctttggcagtgccatgggtgagccgagcagctgtgaggtgggtggggcagggctgtagcccacgccgggtgctattccaggctctaggggctggtgctcatccccacccccagcgacttccgtcctacctggcatgctgcagccctctgccggctgtggtgtcctctgaatttggacccaggttgcctgctcttgttgtgggggtgggattggggctgtctgtgtttcccaggtggagctcatgtttgtgatcctctatctggacagctctccagaatcctgtgttgcccctgttctgcctttctgggatgggagagaaggtgagggagccggcgagcaggttctaccctctctgctaagggcctagcacactttgatgaggttcctggacgtgagaccctcacaaagaccaaccattcctctaatagccatttaacggtactgcagttcatgggaaaatgtcctcattcttaggagatagatgctggattatataggtgaatgccttcaagaaatgtgtaatttaattccaaatagttccccccaaaatacacaaagcaaataaggccaaaatgttcattgttgaatctgcagtggctggtatttcagtgaacagtgtacttgttctttcaacttttctgtatgtttggaatttttcttaataaaagattgtgggaaatggtc

SEQ ID NO: 4252 - protein, 227 aa, Homosapiens; identical to SEQ ID NO: 606

SEQ ID NO: 4253 - DNA, 4636 bp, Homosapiens
gccgccctccattgtctccacggcggcgaggagcgccggcgagcgcagcccgggaccgagcggggcggcgcggctggcggggccggcggcggctgaagcgagagcgcgacgcgacgcgaccgcggcttcccgagctgcgcctggccgcccagcgccgcggcccgcccgaggcctggaggggtccgggccgccgtccatggtcgcggcgtcctgaggcgggggacgcgcccggcgcccccggccctcctccgcctcctcccgcggggcgggcggcctcctccggcgcctccccgcgcccgcccgccgctcgccgccgcctccctccctccttccctgcggctcccccggctttcggagcccgggggcggcctgtggcgcgcggagcccgcgccggactgcgcctctttggaccttgaggggaaacatgcgtttgccttggatcgtttgaaattctgagtttgggatccccgcccgcccgcctgcctcttccgccccgcgggttttttccttttttccttttgctttttttccttttctccctccgggtctcctttttgactccctccccctttatgctcgcccagccctccccctgctgctgagaagtgggggagggtctcggcctccaggttcccgccccaccggggcccgggcgagcatggggggcaagcagagcacggcggcccgctcccggggccccttcccgggggtctccaccgatgacagcgccgtgccgccgccgggaggggcgccccatttcgggcactaccggacgggcggcggggccatggggctgcgcagccgctcggtcagctcggtggcaggcatgggcatggaccccagcacggccgggggggtgccctttggcctctacacccccgcctcccggggcaccggcgactccgagagggcgcccggcggcggagggtctgcgtccgactccacctatgcccatggcaatggttaccaggagacgggcggcggtcaccatagagacgggatgctgtacctgggctcccgagcctcgctggcggatgctctacctctgcacatcgcacccaggtggttcagctcgcatagtggtttcaagtgccccatttgctccaagtctgtggcttctgacgagatggaaatgcactttataatgtgtttgagcaaacctcgcctctcctacaacgatgatgtgctgactaaagacgcgggtgagtgtgtgatctgcctggaggagctgctgcagggggacacgatagccaggctgccctgcctgtgcatctatcacaaaagctgcatagactcgtggtttgaagtgaacagatcttgtccggaacaccctgcggactgacctgcgggcttgcttgctgactcctctcaaagggacagagcgcccctgctccagggaggaggctcaccggaccctggggcagagctgagcttgggacaccagcgggaacagggcaccccttctgcactgacttccagatcatggttctcccttcctccctgaggacaccaaattggatgagagcaagtttgagagaagaatgaatcaactgctatccttcccctcacccctcagcccaggagggaaagggcattttctttttcatctttgaaaggcattgtgggtctgtctttaaagtgtttacaaaaaaaaattatataaaaaaaaagtctagtgtcgactggtgttttccctcgtgatgtttacagcttgctgtttgctgcccagccataacccactcagtgacagacgaacacagctaaggcctcgctgccagccttctgacggcgggcgagcacacggtctcttcccctgccccaactggccctctccaccaccaacttctctactttgggtttgtttggttttttccctctatttttctggctggttttttgctcttttctccccttgagaccctaatatcttgacttcattgccaaaaaacaacccattgagaactttcttcctactgatcccatctcttttcccttctttcctcctggttccggtcagttcagaggatttaacaatcacaagtgtcctgcaaaaatgcctgaacattattcttaggccctcgtggattttttttttcagaaaacttaaacaaaaaaagacttactaagaaatatgtacagctacccctgttttcaggcactatgtttgagaacattttagccattgatgttcacacgtggcatcagcccatgcaagataggtttctgtatttatatattaaaatacaaaaaaaaacttataaaatgtttaaaaaaatgttcaaagcttgggagaaaagctttcttcattagtcaaggtgttttgatatggtattaaaatgtctaataaaagatggcactgcgtgattttattttaatgaagtgttatacaatcaagaaatgggggcaagggcctgccccccactccctcacctacctccttagcattccttcaggctgctactcggggctccaggtgtgtgaattggtcctcagatagtcaggcctgggtggagggagtggcaagtcaggcgtgcctcctacaagcttcctaacctcttaagcatcatggaaccagtcagccctctgtggagtcattgtgctggacctctgaaaagatctgcaggggccaagatgttgcagccaccggaggctgcaaggatgtgggttcttccaggtgtgggcccagcccccctccttccagcctttgctccccatcccacgttccactcgccctgcctgttgttcagtttgcgtctcagtgctgactcacgggcatgcttcattgaggcccaggaagaggccctggtttggggctgtgccagctcagagcccttgaaccagaaccaactgctcaggctcacaaaagttggcaaaatgcgggctgggcaggcagctcggggcagggagcagcagtgcaggcctggcctgtgtccccgtgcccagcgggctcccggagcagcattccagagcctcctgcagagccagcgaaggaaagctctagagggagacgactccaccgcctctctgctctgacccttctcaggcccgcctgatgtgctggaccatccccctgctgccacggcccctggctccgcagtcaccctccatcagatgcttccagaagcacctactctgtgcaagggcattcacaacaggccagtgggcaaacgtgagccagggccagcggagaaacactaaagaagactcggtggttcagagcctgggtctcagcgcgggacccgtctggggtgaagaccttggggctgttgtgagtcggtggcaggaacgtgggctctagactgtgcattcaggctctcctacttggcagaatgatcttggggaaacgacttcatctgaacttcagatatttcacatgtgaagcggggacaaaaccatgcagctcagaggtccctgtgggggctgggggagctgccctgcaggtcttggcacatgcacagcaggctccccatagctttgtcaccacaaagggcactgttctattcacagcacctcctgcttctgcctggcaactgtgtctccctgtgctatatttaattccaccagcaaagctggcgaggcagggcccagccctgaaggagatctccttgcctgacccctggacctggaaatggaggcttcatgtgcccgccttggcggcttaagcctgctgctttggcagtgccatgggtgagccgagcagctgtgaggtgggtggggcagggctgtagcccacgccgggtgctattccaggctctaggggctggtgctcatccccacccccagcgacttccgtcctacctggcatgctgcagccctctgccggctgtggtgtcctctgaatttggacccaggttgcctgctcttgttgtgggggtgggattggggctgtctgtgtttcccaggtggagctcatgtttgtgatcctctatctggacagctctccagaatcctgtgttgcccctgttctgcctttctgggatgggagagaaggtgagggagccggcgagcaggttctaccctctctgctaagggcctagcacactttgatgaggttcctggacgtgagaccctcacaaagaccaaccattcctctaatagccatttaacggtactgcagttcatgggaaaatgtcctcattcttaggagatagatgctggattatataggtgaatgccttcaagaaatgtgtaatttaattccaaatagttccccccaaaatacacaaagcaaataaggccaaaatgttcattgttgaatctgcagtggctggtatttcagtgaacagtgtacttgttctttcaacttttctgtatgtttggaatttttcttaataaaagattgtgggaaatggtcatttgctgagcgcctcctagttgccaggcactggagggcgcatcaaagaagagtcctacccaggagggagagcgcagctgctgcaggattctcgcctggaagagtgggtggctggctggctggctggaaggggaggggcgagagggctgtctcggtgatgagcacacgcgtgctggggtggtttggggagagggctgagatttgtcaccagtgagcccttggcacggtctctgctccccaccagggcagcacgggacagaaacgtcacggaggagtagcctc

SEQ ID NO: 4254 - protein, 227 aa, Homosapiens; identical to SEQ ID NO: 606

SEQ ID NO: 4255 - DNA, 2483 bp, Homosapiens
cggcgaggagcgccggcgagcgcagcccgggaccgagcggggcggcgcggctggcggggccggcggcggctgaagcgagagcgcgacgcgacgcgaccgcggcttcccgagctgcgcctggccgcccagcgccgcggcccgcccgaggcctggaggggtccgggccgccgtccatggtcgcggcgtcctgaggcgggggacgcgcccggcgcccccggccctcctccgcctcctcccgcggggcgggcggcctcctccggcgcctccccgcgcccgcccgccgctcgccgccgcctccctccctccttccctgcggctcccccggctttcggagcccgggggcggcctgtggcgcgcggagcccgcgccggactgcgcctctttggaccttgaggggaaacatgcgtttgccttggatcgtttgaaattctgagtttgggatccccgcccgcccgcctgcctcttccgccccgcgggttttttccttttttccttttgctttttttccttttctccctccgggtctcctttttgactccctccccctttatgctcgcccagccctccccctgctgctgagaagtgggggagggtctcggcctccaggttcccgccccaccggggcccgggcgagcatggggggcaagcagagcacggcggcccgctcccggggccccttcccgggggtctccaccgatgacagcgccgtgccgccgccgggaggggcgccccatttcgggcactaccggacgggcggcggggccatggggctgcgcagccgctcggtcagctcggtggcaggcatgggcatggaccccagcacggccgggggggtgccctttggcctctacacccccgcctcccggggcaccggcgactccgagagggcgcccggcggcggagggtctgcgtccgactccacctatgcccatggcaatggttaccaggagacgggcggcggtcaccatagagacgggatgctgtacctgggctcccgagcctcgctggcggatgctctacctctgcacatcgcacccaggtggttcagctcgcatagtggtttcaagtgccccatttgctccaagtctgtggcttctgacgagatggaaatgcactttataatgtgtttgagcaaacctcgcctctcctacaacggaagaatacaaagaagcctcagaggggctcagcctgagaaaacctggctctcaggaagaactttgcaagagcagccgtggaggacagagtgctcttgggcccccatggcccaaatgcagagttacccccactgccctgtggagaaccgggaagatgatgtgctgactaaagacgcgggtgagtgtgtgatctgcctggaggagctgctgcagggggacacgatagccaggctgccctgcctgtgcatctatcacaaaagctgcatagactcgtggtttgaagtgaacagatcttgtccggaacaccctgcggactgacctgcgggcttgcttgctgactcctctcaaagggacagagcgcccctgctccagggaggaggctcaccggaccctggggcagagctgagcttgggacaccagcgggaacagggcaccccttctgcactgacttccagatcatggttctcccttcctccctgaggacaccaaattggatgagagcaagtttgagagaagaatgaatcaactgctatccttcccctcacccctcagcccaggagggaaagggcattttctttttcatctttgaaaggcattgtgggtctgtctttaaagtgtttacaaaaaaaaattatataaaaaaaaagtctagtgtcgactggtgttttccctcgtgatgtttacagcttgctgtttgctgcccagccataacccactcagtgacagacgaacacagctaaggcctcgctgccagccttctgacggcgggcgagcacacggtctcttcccctgccccaactggccctctccaccaccaacttctctactttgggtttgtttggttttttccctctatttttctggctggttttttgctcttttctccccttgagaccctaatatcttgacttcattgccaaaaaacaacccattgagaactttcttcctactgatcccatctcttttcccttctttcctcctggttccggtcagttcagaggatttaacaatcacaagtgtcctgcaaaaatgcctgaacattattcttaggccctcgtggattttttttttcagaaaacttaaacaaaaaaagacttactaagaaatatgtacagctacccctgttttcaggcactatgtttgagaacattttagccattgatgttcacacgtggcatcagcccatgcaagataggtttctgtatttatatattaaaatacaaaaaaaaacttataaaatgtttaaaaaaatgttcaaagcttgggagaaaagctttcttcattagtcaaggtgttttgatatggtattaaaatgtctaataaaagatg

SEQ ID NO: 4256 - protein, 278 aa, Homosapiens
MGGKQSTAARSRGPFPGVSTDDSAVPPPGGAPHFGHYRTGGGAMGLRSRSVSSVAGMGMDPSTAGGVPFGLYTPASRGTGDSERAPGGGGSASDSTYAHGNGYQETGGGHHRDGMLYLGSRASLADALPLHIAPRWFSSHSGFKCPICSKSVASDEMEMHFIMCLSKPRLSYNGRIQRSLRGAQPEKTWLSGRTLQEQPWRTECSWAPMAQMQSYPHCPVENREDDVLTKDAGECVICLEELLQGDTIARLPCLCIYHKSCIDSWFEVNRSCPEHPAD

SEQ ID NO: 4257 - DNA, 449 bp, Homosapiens
tcgcacccaggtggttcagctcgcatagtggtctgtgcatctatcacaaaagctgcatagactcgtggtttgaagtgaacagatcttgtccggaacaccctgcggactgacctgcgggcttgcttgctgactcctctcaaagggacagagcgcccctgctccagggaggaggctcaccggaccctggggcagagctgagcttgggacaccagcgggaacagggcaccccttctgcactgacttccagatcatggttctcccttcctccctgaggacaccaaattggatgagagcaagtttgagagaagaatgaatcaactgctatccttcccctcacccctcagcccaggagggaaagggcattttctttttcatctttgaaaggcattgtgggtctgtctttaaagtgtttacaaaaaaaaattatataaaaaaaaagtctagtgtcg

SEQ ID NO: 4258 - protein, 53 aa, Homosapiens
PAGLLADSSQRDRAPLLQGGGSPDPGAELSLGHQREQGTPSALTSRSWFSLPP

SEQ ID NO: 4259 - DNA, 872 bp, Homosapiens
atacctaccgtctggaaactaggctttctgcgaggctgcggagcctggcgatttagggactcacggcgtgtgttcacttgtggaagggcagagcgaagcctacctattggagttccatttattggcatcaccctcctcagagaagagagacggggtttcaccgtgttagccaggatggtcttgatctcctgacctcatgatcagcccacctcggcctcccaaagtgctgggattacaggtgtgagccaccacgcccggaatgaagtatttcaggtttcaagtgccccatttgctccaagtctgtggcttctgacgagatggaaatgcactttataatgtgtttgagcaaacctcgcctctcctacaacgatgatgtgctgactaaagacgcgggtgagtgtgtgatctgcctggaggagctgctgcagggggacacgatagccaggctgccctgcctgtgcatctatcacaaaagctgcatagactcgtggtttgaagtgaacagatcttgtccggaacaccctgcggactgacctgcgggcttgcttgctgactcctctcaaagggacagagcgcccctgctccagggaggaggctcaccggaccctggggcagagctgagcttgggacaccagcgggaacagggcaccccttctgcactgacttccagatcatggttctcccttcctccctgaggacaccaaattggatgagagcaagtttgagagaagaatgaatcaactgctatccttcccctcacccctcagcccaggagggaaagggcattttctttttcatctttgaaaggcattgtgggtctgtctttaaagtgtttacaaaaaaaaattatataaaaaaaaagtctagtgtcg

SEQ ID NO: 4260 - protein, 71 aa, Homosapiens
MEMHFIMCLSKPRLSYNDDVLTKDAGECVICLEELLQGDTIARLPCLCIYHKSCIDSWFEVNRSCPEHPAD

SEQ ID NO: 4261 - DNA, 1544 bp, Homosapiens
atacctaccgtctggaaactaggctttctgcgaggctgcggagcctggcgatttagggactcacggcgtgtgttcacttgtggaagggcagagcgaagcctacctattggagttccatttattggcatcaccctcctcagagaagagagacggggtttcaccgtgttagccaggatggtcttgatctcctgacctcatgatcagcccacctcggcctcccaaagtgctgggattacaggtgtgagccaccacgcccggaatgaagtatttcaggtttcaagtgccccatttgctccaagtctgtggcttctgacgagatggaaatgcactttataatgtgtttgagcaaacctcgcctctcctacaacgatgatgtgctgactaaagacgcgggtgagtgtgtgatctgcctggaggagctgctgcagggggacacgatagccaggctgccctgcctgtgcatctatcacaaaagctgcatagactcgtggtttgaagtgaacagatcttgtccggaacaccctgcggactgacctgcgggcttgcttgctgactcctctcaaagggacagagcgcccctgctccagggaggaggctcaccggaccctggggcagagctgagcttgggacaccagcgggaacagggcaccccttctgcactgacttccagatcatggttctcccttcctccctgaggacaccaaattggatgagagcaagtttgagagaagaatgaatcaactgctatccttcccctcacccctcagcccaggagggaaagggcattttctttttcatctttgaaaggcattgtgggtctgtctttaaagtgtttacaaaaaaaaattatataaaaaaaaagtctagtgtcgactggtgttttccctcgtgatgtttacagcttgctgtttgctgcccagccataacccactcagtgacagacgaacacagctaaggcctcgctgccagccttctgacggcgggcgagcacacggtctcttcccctgccccaactggccctctccaccaccaacttctctactttgggtttgtttggttttttccctctatttttctggctggttttttgctcttttctccccttgagaccctaatatcttgacttcattgccaaaaaacaacccattgagaactttcttcctactgatcccatctcttttcccttctttcctcctggttccggtcagttcagaggatttaacaatcacaagtgtcctgcaaaaatgcctgaacattattcttaggccctcgtggattttttttttcagaaaacttaaacaaaaaaagacttactaagaaatatgtacagctacccctgttttcaggcactatgtttgagaacattttagccattgatgttcacacgtggcatcagcccatgcaagataggtttctgtatttatatattaaaatacaaaaaaaaacttataaaatgtttaaaaaaatgttcaaagcttgggagaaaagctttcttcattagtcaaggtgttttgatatggtattaaaatgtctaataaaagatg

SEQ ID NO: 4262 - protein, 71 aa, Homosapiens; identical to SEQ ID NO: 4260

SEQ ID NO: 4263 - DNA, 3545 bp, Homosapiens
atacctaccgtctggaaactaggctttctgcgaggctgcggagcctggcgatttagggactcacggcgtgtgttcacttgtggaagggcagagcgaagcctacctattggagttccatttattggcatcaccctcctcagagaagagagacggggtttcaccgtgttagccaggatggtcttgatctcctgacctcatgatcagcccacctcggcctcccaaagtgctgggattacaggtgtgagccaccacgcccggaatgaagtatttcaggtttcaagtgccccatttgctccaagtctgtggcttctgacgagatggaaatgcactttataatgtgtttgagcaaacctcgcctctcctacaacgatgatgtgctgactaaagacgcgggtgagtgtgtgatctgcctggaggagctgctgcagggggacacgatagccaggctgccctgcctgtgcatctatcacaaaagctgcatagactcgtggtttgaagtgaacagatcttgtccggaacaccctgcggactgacctgcgggcttgcttgctgactcctctcaaagggacagagcgcccctgctccagggaggaggctcaccggaccctggggcagagctgagcttgggacaccagcgggaacagggcaccccttctgcactgacttccagatcatggttctcccttcctccctgaggacaccaaattggatgagagcaagtttgagagaagaatgaatcaactgctatccttcccctcacccctcagcccaggagggaaagggcattttctttttcatctttgaaaggcattgtgggtctgtctttaaagtgtttacaaaaaaaaattatataaaaaaaaagtctagtgtcgactggtgttttccctcgtgatgtttacagcttgctgtttgctgcccagccataacccactcagtgacagacgaacacagctaaggcctcgctgccagccttctgacggcgggcgagcacacggtctcttcccctgccccaactggccctctccaccaccaacttctctactttgggtttgtttggttttttccctctatttttctggctggttttttgctcttttctccccttgagaccctaatatcttgacttcattgccaaaaaacaacccattgagaactttcttcctactgatcccatctcttttcccttctttcctcctggttccggtcagttcagaggatttaacaatcacaagtgtcctgcaaaaatgcctgaacattattcttaggccctcgtggattttttttttcagaaaacttaaacaaaaaaagacttactaagaaatatgtacagctacccctgttttcaggcactatgtttgagaacattttagccattgatgttcacacgtggcatcagcccatgcaagataggtttctgtatttatatattaaaatacaaaaaaaaacttataaaatgtttaaaaaaatgttcaaagcttgggagaaaagctttcttcattagtcaaggtgttttgatatggtattaaaatgtctaataaaagatggcactgcgtgattttattttaatgaagtgttatacaatcaagaaatgggggcaagggcctgccccccactccctcacctacctccttagcattccttcaggctgctactcggggctccaggtgtgtgaattggtcctcagatagtcaggcctgggtggagggagtggcaagtcaggcgtgcctcctacaagcttcctaacctcttaagcatcatggaaccagtcagccctctgtggagtcattgtgctggacctctgaaaagatctgcaggggccaagatgttgcagccaccggaggctgcaaggatgtgggttcttccaggtgtgggcccagcccccctccttccagcctttgctccccatcccacgttccactcgccctgcctgttgttcagtttgcgtctcagtgctgactcacgggcatgcttcattgaggcccaggaagaggccctggtttggggctgtgccagctcagagcccttgaaccagaaccaactgctcaggctcacaaaagttggcaaaatgcgggctgggcaggcagctcggggcagggagcagcagtgcaggcctggcctgtgtccccgtgcccagcgggctcccggagcagcattccagagcctcctgcagagccagcgaaggaaagctctagagggagacgactccaccgcctctctgctctgacccttctcaggcccgcctgatgtgctggaccatccccctgctgccacggcccctggctccgcagtcaccctccatcagatgcttccagaagcacctactctgtgcaagggcattcacaacaggccagtgggcaaacgtgagccagggccagcggagaaacactaaagaagactcggtggttcagagcctgggtctcagcgcgggacccgtctggggtgaagaccttggggctgttgtgagtcggtggcaggaacgtgggctctagactgtgcattcaggctctcctacttggcagaatgatcttggggaaacgacttcatctgaacttcagatatttcacatgtgaagcggggacaaaaccatgcagctcagaggtccctgtgggggctgggggagctgccctgcaggtcttggcacatgcacagcaggctccccatagctttgtcaccacaaagggcactgttctattcacagcacctcctgcttctgcctggcaactgtgtctccctgtgctatatttaattccaccagcaaagctggcgaggcagggcccagccctgaaggagatctccttgcctgacccctggacctggaaatggaggcttcatgtgcccgccttggcggcttaagcctgctgctttggcagtgccatgggtgagccgagcagctgtgaggtgggtggggcagggctgtagcccacgccgggtgctattccaggctctaggggctggtgctcatccccacccccagcgacttccgtcctacctggcatgctgcagccctctgccggctgtggtgtcctctgaatttggacccaggttgcctgctcttgttgtgggggtgggattggggctgtctgtgtttcccaggtggagctcatgtttgtgatcctctatctggacagctctccagaatcctgtgttgcccctgttctgcctttctgggatgggagagaaggtgagggagccggcgagcaggttctaccctctctgctaagggcctagcacactttgatgaggttcctggacgtgagaccctcacaaagaccaaccattcctctaatagccatttaacggtactgcagttcatgggaaaatgtcctcattcttaggagatagatgctggattatataggtgaatgccttcaagaaatgtgtaatttaattccaaatagttccccccaaaatacacaaagcaaataaggccaaaatgttcattgttgaatctgcagtggctggtatttcagtgaacagtgtacttgttctttcaacttttctgtatgtttggaatttttcttaataaaagattgtgggaaatggtc

SEQ ID NO: 4264 - protein, 71 aa, Homosapiens; identical to SEQ ID NO: 4260

SEQ ID NO: 4265 - DNA, 3823 bp, Homosapiens
atacctaccgtctggaaactaggctttctgcgaggctgcggagcctggcgatttagggactcacggcgtgtgttcacttgtggaagggcagagcgaagcctacctattggagttccatttattggcatcaccctcctcagagaagagagacggggtttcaccgtgttagccaggatggtcttgatctcctgacctcatgatcagcccacctcggcctcccaaagtgctgggattacaggtgtgagccaccacgcccggaatgaagtatttcaggtttcaagtgccccatttgctccaagtctgtggcttctgacgagatggaaatgcactttataatgtgtttgagcaaacctcgcctctcctacaacgatgatgtgctgactaaagacgcgggtgagtgtgtgatctgcctggaggagctgctgcagggggacacgatagccaggctgccctgcctgtgcatctatcacaaaagctgcatagactcgtggtttgaagtgaacagatcttgtccggaacaccctgcggactgacctgcgggcttgcttgctgactcctctcaaagggacagagcgcccctgctccagggaggaggctcaccggaccctggggcagagctgagcttgggacaccagcgggaacagggcaccccttctgcactgacttccagatcatggttctcccttcctccctgaggacaccaaattggatgagagcaagtttgagagaagaatgaatcaactgctatccttcccctcacccctcagcccaggagggaaagggcattttctttttcatctttgaaaggcattgtgggtctgtctttaaagtgtttacaaaaaaaaattatataaaaaaaaagtctagtgtcgactggtgttttccctcgtgatgtttacagcttgctgtttgctgcccagccataacccactcagtgacagacgaacacagctaaggcctcgctgccagccttctgacggcgggcgagcacacggtctcttcccctgccccaactggccctctccaccaccaacttctctactttgggtttgtttggttttttccctctatttttctggctggttttttgctcttttctccccttgagaccctaatatcttgacttcattgccaaaaaacaacccattgagaactttcttcctactgatcccatctcttttcccttctttcctcctggttccggtcagttcagaggatttaacaatcacaagtgtcctgcaaaaatgcctgaacattattcttaggccctcgtggattttttttttcagaaaacttaaacaaaaaaagacttactaagaaatatgtacagctacccctgttttcaggcactatgtttgagaacattttagccattgatgttcacacgtggcatcagcccatgcaagataggtttctgtatttatatattaaaatacaaaaaaaaacttataaaatgtttaaaaaaatgttcaaagcttgggagaaaagctttcttcattagtcaaggtgttttgatatggtattaaaatgtctaataaaagatggcactgcgtgattttattttaatgaagtgttatacaatcaagaaatgggggcaagggcctgccccccactccctcacctacctccttagcattccttcaggctgctactcggggctccaggtgtgtgaattggtcctcagatagtcaggcctgggtggagggagtggcaagtcaggcgtgcctcctacaagcttcctaacctcttaagcatcatggaaccagtcagccctctgtggagtcattgtgctggacctctgaaaagatctgcaggggccaagatgttgcagccaccggaggctgcaaggatgtgggttcttccaggtgtgggcccagcccccctccttccagcctttgctccccatcccacgttccactcgccctgcctgttgttcagtttgcgtctcagtgctgactcacgggcatgcttcattgaggcccaggaagaggccctggtttggggctgtgccagctcagagcccttgaaccagaaccaactgctcaggctcacaaaagttggcaaaatgcgggctgggcaggcagctcggggcagggagcagcagtgcaggcctggcctgtgtccccgtgcccagcgggctcccggagcagcattccagagcctcctgcagagccagcgaaggaaagctctagagggagacgactccaccgcctctctgctctgacccttctcaggcccgcctgatgtgctggaccatccccctgctgccacggcccctggctccgcagtcaccctccatcagatgcttccagaagcacctactctgtgcaagggcattcacaacaggccagtgggcaaacgtgagccagggccagcggagaaacactaaagaagactcggtggttcagagcctgggtctcagcgcgggacccgtctggggtgaagaccttggggctgttgtgagtcggtggcaggaacgtgggctctagactgtgcattcaggctctcctacttggcagaatgatcttggggaaacgacttcatctgaacttcagatatttcacatgtgaagcggggacaaaaccatgcagctcagaggtccctgtgggggctgggggagctgccctgcaggtcttggcacatgcacagcaggctccccatagctttgtcaccacaaagggcactgttctattcacagcacctcctgcttctgcctggcaactgtgtctccctgtgctatatttaattccaccagcaaagctggcgaggcagggcccagccctgaaggagatctccttgcctgacccctggacctggaaatggaggcttcatgtgcccgccttggcggcttaagcctgctgctttggcagtgccatgggtgagccgagcagctgtgaggtgggtggggcagggctgtagcccacgccgggtgctattccaggctctaggggctggtgctcatccccacccccagcgacttccgtcctacctggcatgctgcagccctctgccggctgtggtgtcctctgaatttggacccaggttgcctgctcttgttgtgggggtgggattggggctgtctgtgtttcccaggtggagctcatgtttgtgatcctctatctggacagctctccagaatcctgtgttgcccctgttctgcctttctgggatgggagagaaggtgagggagccggcgagcaggttctaccctctctgctaagggcctagcacactttgatgaggttcctggacgtgagaccctcacaaagaccaaccattcctctaatagccatttaacggtactgcagttcatgggaaaatgtcctcattcttaggagatagatgctggattatataggtgaatgccttcaagaaatgtgtaatttaattccaaatagttccccccaaaatacacaaagcaaataaggccaaaatgttcattgttgaatctgcagtggctggtatttcagtgaacagtgtacttgttctttcaacttttctgtatgtttggaatttttcttaataaaagattgtgggaaatggtcatttgctgagcgcctcctagttgccaggcactggagggcgcatcaaagaagagtcctacccaggagggagagcgcagctgctgcaggattctcgcctggaagagtgggtggctggctggctggctggaaggggaggggcgagagggctgtctcggtgatgagcacacgcgtgctggggtggtttggggagagggctgagatttgtcaccagtgagcccttggcacggtctctgctccccaccagggcagcacgggacagaaacgtcacggaggagtag

SEQ ID NO: 4266 - protein, 71 aa, Homosapiens; identical to SEQ ID NO: 4260

SEQ ID NO: 4267 - DNA, 627 bp, Homosapiens
cttcagtggtacatcctacataattacagtgcaatagcaaaatgaggcaattggcatgggtgctgttagtaccatccatagaccatattcagatctcatcactttcacatgcacccatttgtgtgtgtgtgtgtgtgtgtgtgtggtttagtgcagtttcatcatacatatgggtttatgtatccaacatcacaatcaagataactgttccactacctcacagatccctaatgctgcccattatagtcatacccatctctcttccctcctccccatccctaataccagtcagccactagtctcttctccagctctagaatttcatcatttcagtaatgctatataaatggaatcatagggcatgtaatccttgggattggctttcttcacttagcataattctccaaactcttgtgtatttcaatagtctattcctttttattgctaagtagtagtccatggtatggatggaccacggtttgtttaatccatccgaggacgtttgtttaatcatcacaaatctattcatctatccactcctttatttatctatccacctcttattttgtacacatttcaaagtaaactatagacatctgtatacttatctttaaatatttcaatatg

SEQ ID NO: 4268 - protein, 51 aa, Homosapiens
MVWMDHGLFNPSEDVCLIITNLFIYPLLYLSIHLLFCTHFKVNYRHLYTYL

SEQ ID NO: 4269 - DNA, 837 bp, Homosapiens
tggtctcgaactcctgacctcatgatccacccacctcagcttcccgaagtgctgtgattacaggcatgagccacagcacacagcccatctttttttaaactatgtttgtttaatcatcacaaatctattcatctatccactcctttatttatctatccacctcttattttgtacacatttcaaagtaaactatagacatctgtatacttatctttaaatatttcaatatgtacatcattaactggtgttaagtatttctttatagcttttcctcttggtggaaagtttacatacaaagaaatgtacacattttaagtacatgttcactgggttttgacaagtacatgcatcagcaaaacccaaaaccctatcaagatagagaatgtgcccgggcgtggtggctcacgcctgtttttccagcactttgggaggccaaggctggaggattgcttgaacccagaagttcgagaccaacttgggcaacatggtgaaaccccatcctgtctcaaaaaaaaaaaaaagaaaagaaaaagataatgttatgttaccccacctgcctcacattgtgagtcagtagactcatagttgggtccaaacataagatgtttgtaaaaaggtccctgattttgaccactacccttttaaataaagaagcttggggatgtgaaagtcctcctccaggtcagcaggcttgtttaaggtgagaccatgtcctctgacctcagggctatgactgccattctcacttcttcaaggccacctccatttccagcaggcaggtgtgtcagacagtaaaattgagagaactgttcagtgaacacccatataaccaccacc

SEQ ID NO: 4270 - protein, 30 aa, Homosapiens [sequence omitted]

SEQ ID NO: 4271 - DNA, 1075 bp, Homosapiens
gagagtcaagtccagtcttgtcataaagcgcctaagccttatcctcatacctgcctctcccttccctgaatccatcacctcctggggggcgatgagggagaccacatgtgccctcctggagctgacacagatggggagagaacacacctggtgtgggaagctgtatgggacccagagaattctaactagtcccttgggctcacagttgagttaccaatcagtaggagaaaatgcaaagataaactacttaggaatcagtaattgccatgttcccaggaaatcctccttaagtatggaggggaaggaatgctttagaggaaactaagggctatagcccatacgctcatgtcatagatgaggtgtccaagacaaagagagtggggaatacaggtccaagaatgtctgcatgacgactctgccctcactaagctatgctgtttttcctcccatctctgttgaggtttttccctctgttttattatgaaaaatgtcaaacacacagcaaagtttttatgtttttttgagacagagtctcgttctgtcacccaggctggagtacagtggcacaatcttggctcactgtaatctctgcctcccgggttcaaatgattctcctgcctcagctacttagtaggctgaggcaggagaaactcttgaggcggaggttgcagtgagctgagatcatgccactgcactccatcctggcgatagagcgagactccatgtcaaaaaaaaaagagagagaacgcccctattacatagcacatgcaccacctggagtctgcagtgtactagacccgtttatccatccaccaacccatcttatccttctgatgcatttcatagtaaaatgcaaacaccagtatgcttccttatcagggtttttaactaaagtagtgcacattcgaacgctacagaaatacataaaaggatttttctccaagtcctcctttcctctaccactgtgaaagtgtgtgcatccttccagactttgatctgtgcctacacatgcatttgaatatgtatggtagctagtgctttcaagcagggggatcacacccatgtgttcatccac

SEQ ID NO: 4272 - protein, 47 aa, Homosapiens
MSNTQQSFYVFLRQSLVLSPRLEYSGTILAHCNLCLPGSNDSPASAT

SEQ ID NO: 4273 - DNA, 2081 bp, Homosapiens
aaagacgcgggtgagtgtgtgatctgcctggaggagctgctgcagggggacacgatagccaggctgccctgcctgtgcatctatcacaaaaggtaggaggggttggcaaggtagcttagtgcaccccacctcccagaggggcggacccccatctccagccattctgtctcctttggttatgggatgacctctcccccgacctctggctccgagcgggtaagggcagaggccatcagacaggtgtccactgtgccggcgggaaggtgcgagcatcccaagtgcagagcagagtggagttgccagaggtgtgctctggtttgagggctcaggtggtgggagctgatggggagacccgtagagcctcacaggttggaggagcttcggatcccactgggaaggttggttctccgtctgtctccctgcctcttcttcctctacgggtccctctgctccacaggggtagaacatcaatctgtgcgaggaaggccaggcggagggtgtacccactgccttgcactggccttctccctagagggccgggaggcaggaagagccatttcctgtggggccacagcactgggcacagttaaaagtagcagggcccagatatgccttgggactccagtgtgagcctcgtccttgtttccagctggaaggaaggcaccctcttgcccaagacaggacactgtgctgcctggggccagcacctgttgaatcctcgagcccagagcttcttcctgacactcaggcctttcaaagcctgactctcagggccactgctgcacagggtgacaaccgggcatggcacgcagtgtggctggtgcagaggaggcttaaggctggcctgggagagattcttggtctagctcccagcacggagccttgcttgtgtcccagggcggcactaaccagaaccagaaaaggaaatctttggccctcggggagaattatgccaattatctgtctggttcctgtctttgaaaatgcccagatgttggtttacaaatcaggaagctgtcttggggcaatctctgttccctctttgatgcagagagcctttctctgtaaacactggagagcagggcttcactgtctggctcccctcccgcctcttgcaggaaggactagatgctgctgatcagctgatcatggctgagccgggtagagcttggggctctcctaagaggtcacccactgggagggagcttcacagctgttcttttgacccaggaaggagctctttcaggactgtggcacccagagccgtggccctcctgccatgccattgttcccacttccctgcccttgggagtcttggagacagctgactagctgccctgaggggtccaccgctctcaccttctcactggtggctgctgccattctcctgggctctgcacagaaagctttggtccttctgaaagccactctgccccttcctgcagcaccagatccccctgagccggtactgctgcctccacctgggccaagactagtcttggtgttcacccttcttcgtgcttcagaaagtagggatatctggggacatgactgtgtttccctggggtcctttcagaagagacttaggaagctcctgctcaggaatctggccctctgaaagagccccttcaaagcagcctgggcagcaggtaacgtggtttcccttgcggccccctcctcccagctgcatagactcgtggtttgaagtgaacagatcttgtccggaacaccctgcggactgacctgcgggcttgcttgctgactcctctcaaagggacagagcgcccctgctccagggaggaggctcaccggaccctggggcagagctgagcttgggacaccagcgggaacagggcaccccttctgcactgacttccagatcatggttctcccttcctccctgaggacaccaaattggatgagagcaagtttgagagaagaatgaatcaactgctatccttcccctcacccctcagcccaggagggaaagggcattttctttttcatctttgaaaggcattgtgggtctgtctttaaagtgtttacaaaaaaaaattatataaaaaaaaagtctagtgtcg

SEQ ID NO: 4274 - protein, 112 aa, Homosapiens [sequence omitted]

SEQ ID NO: 4275 - DNA, 2753 bp, Homosapiens
aaagacgcgggtgagtgtgtgatctgcctggaggagctgctgcagggggacacgatagccaggctgccctgcctgtgcatctatcacaaaaggtaggaggggttggcaaggtagcttagtgcaccccacctcccagaggggcggacccccatctccagccattctgtctcctttggttatgggatgacctctcccccgacctctggctccgagcgggtaagggcagaggccatcagacaggtgtccactgtgccggcgggaaggtgcgagcatcccaagtgcagagcagagtggagttgccagaggtgtgctctggtttgagggctcaggtggtgggagctgatggggagacccgtagagcctcacaggttggaggagcttcggatcccactgggaaggttggttctccgtctgtctccctgcctcttcttcctctacgggtccctctgctccacaggggtagaacatcaatctgtgcgaggaaggccaggcggagggtgtacccactgccttgcactggccttctccctagagggccgggaggcaggaagagccatttcctgtggggccacagcactgggcacagttaaaagtagcagggcccagatatgccttgggactccagtgtgagcctcgtccttgtttccagctggaaggaaggcaccctcttgcccaagacaggacactgtgctgcctggggccagcacctgttgaatcctcgagcccagagcttcttcctgacactcaggcctttcaaagcctgactctcagggccactgctgcacagggtgacaaccgggcatggcacgcagtgtggctggtgcagaggaggcttaaggctggcctgggagagattcttggtctagctcccagcacggagccttgcttgtgtcccagggcggcactaaccagaaccagaaaaggaaatctttggccctcggggagaattatgccaattatctgtctggttcctgtctttgaaaatgcccagatgttggtttacaaatcaggaagctgtcttggggcaatctctgttccctctttgatgcagagagcctttctctgtaaacactggagagcagggcttcactgtctggctcccctcccgcctcttgcaggaaggactagatgctgctgatcagctgatcatggctgagccgggtagagcttggggctctcctaagaggtcacccactgggagggagcttcacagctgttcttttgacccaggaaggagctctttcaggactgtggcacccagagccgtggccctcctgccatgccattgttcccacttccctgcccttgggagtcttggagacagctgactagctgccctgaggggtccaccgctctcaccttctcactggtggctgctgccattctcctgggctctgcacagaaagctttggtccttctgaaagccactctgccccttcctgcagcaccagatccccctgagccggtactgctgcctccacctgggccaagactagtcttggtgttcacccttcttcgtgcttcagaaagtagggatatctggggacatgactgtgtttccctggggtcctttcagaagagacttaggaagctcctgctcaggaatctggccctctgaaagagccccttcaaagcagcctgggcagcaggtaacgtggtttcccttgcggccccctcctcccagctgcatagactcgtggtttgaagtgaacagatcttgtccggaacaccctgcggactgacctgcgggcttgcttgctgactcctctcaaagggacagagcgcccctgctccagggaggaggctcaccggaccctggggcagagctgagcttgggacaccagcgggaacagggcaccccttctgcactgacttccagatcatggttctcccttcctccctgaggacaccaaattggatgagagcaagtttgagagaagaatgaatcaactgctatccttcccctcacccctcagcccaggagggaaagggcattttctttttcatctttgaaaggcattgtgggtctgtctttaaagtgtttacaaaaaaaaattatataaaaaaaaagtctagtgtcgactggtgttttccctcgtgatgtttacagcttgctgtttgctgcccagccataacccactcagtgacagacgaacacagctaaggcctcgctgccagccttctgacggcgggcgagcacacggtctcttcccctgccccaactggccctctccaccaccaacttctctactttgggtttgtttggttttttccctctatttttctggctggttttttgctcttttctccccttgagaccctaatatcttgacttcattgccaaaaaacaacccattgagaactttcttcctactgatcccatctcttttcccttctttcctcctggttccggtcagttcagaggatttaacaatcacaagtgtcctgcaaaaatgcctgaacattattcttaggccctcgtggattttttttttcagaaaacttaaacaaaaaaagacttactaagaaatatgtacagctacccctgttttcaggcactatgtttgagaacattttagccattgatgttcacacgtggcatcagcccatgcaagataggtttctgtatttatatattaaaatacaaaaaaaaacttataaaatgtttaaaaaaatgttcaaagcttgggagaaaagctttcttcattagtcaaggtgttttgatatggtattaaaatgtctaataaaagatg

SEQ ID NO: 4276 - protein, 112 aa, Homosapiens [sequence omitted]

SEQ ID NO: 4277 - DNA, 4754 bp, Homosapiens
aaagacgcgggtgagtgtgtgatctgcctggaggagctgctgcagggggacacgatagccaggctgccctgcctgtgcatctatcacaaaaggtaggaggggttggcaaggtagcttagtgcaccccacctcccagaggggcggacccccatctccagccattctgtctcctttggttatgggatgacctctcccccgacctctggctccgagcgggtaagggcagaggccatcagacaggtgtccactgtgccggcgggaaggtgcgagcatcccaagtgcagagcagagtggagttgccagaggtgtgctctggtttgagggctcaggtggtgggagctgatggggagacccgtagagcctcacaggttggaggagcttcggatcccactgggaaggttggttctccgtctgtctccctgcctcttcttcctctacgggtccctctgctccacaggggtagaacatcaatctgtgcgaggaaggccaggcggagggtgtacccactgccttgcactggccttctccctagagggccgggaggcaggaagagccatttcctgtggggccacagcactgggcacagttaaaagtagcagggcccagatatgccttgggactccagtgtgagcctcgtccttgtttccagctggaaggaaggcaccctcttgcccaagacaggacactgtgctgcctggggccagcacctgttgaatcctcgagcccagagcttcttcctgacactcaggcctttcaaagcctgactctcagggccactgctgcacagggtgacaaccgggcatggcacgcagtgtggctggtgcagaggaggcttaaggctggcctgggagagattcttggtctagctcccagcacggagccttgcttgtgtcccagggcggcactaaccagaaccagaaaaggaaatctttggccctcggggagaattatgccaattatctgtctggttcctgtctttgaaaatgcccagatgttggtttacaaatcaggaagctgtcttggggcaatctctgttccctctttgatgcagagagcctttctctgtaaacactggagagcagggcttcactgtctggctcccctcccgcctcttgcaggaaggactagatgctgctgatcagctgatcatggctgagccgggtagagcttggggctctcctaagaggtcacccactgggagggagcttcacagctgttcttttgacccaggaaggagctctttcaggactgtggcacccagagccgtggccctcctgccatgccattgttcccacttccctgcccttgggagtcttggagacagctgactagctgccctgaggggtccaccgctctcaccttctcactggtggctgctgccattctcctgggctctgcacagaaagctttggtccttctgaaagccactctgccccttcctgcagcaccagatccccctgagccggtactgctgcctccacctgggccaagactagtcttggtgttcacccttcttcgtgcttcagaaagtagggatatctggggacatgactgtgtttccctggggtcctttcagaagagacttaggaagctcctgctcaggaatctggccctctgaaagagccccttcaaagcagcctgggcagcaggtaacgtggtttcccttgcggccccctcctcccagctgcatagactcgtggtttgaagtgaacagatcttgtccggaacaccctgcggactgacctgcgggcttgcttgctgactcctctcaaagggacagagcgcccctgctccagggaggaggctcaccggaccctggggcagagctgagcttgggacaccagcgggaacagggcaccccttctgcactgacttccagatcatggttctcccttcctccctgaggacaccaaattggatgagagcaagtttgagagaagaatgaatcaactgctatccttcccctcacccctcagcccaggagggaaagggcattttctttttcatctttgaaaggcattgtgggtctgtctttaaagtgtttacaaaaaaaaattatataaaaaaaaagtctagtgtcgactggtgttttccctcgtgatgtttacagcttgctgtttgctgcccagccataacccactcagtgacagacgaacacagctaaggcctcgctgccagccttctgacggcgggcgagcacacggtctcttcccctgccccaactggccctctccaccaccaacttctctactttgggtttgtttggttttttccctctatttttctggctggttttttgctcttttctccccttgagaccctaatatcttgacttcattgccaaaaaacaacccattgagaactttcttcctactgatcccatctcttttcccttctttcctcctggttccggtcagttcagaggatttaacaatcacaagtgtcctgcaaaaatgcctgaacattattcttaggccctcgtggattttttttttcagaaaacttaaacaaaaaaagacttactaagaaatatgtacagctacccctgttttcaggcactatgtttgagaacattttagccattgatgttcacacgtggcatcagcccatgcaagataggtttctgtatttatatattaaaatacaaaaaaaaacttataaaatgtttaaaaaaatgttcaaagcttgggagaaaagctttcttcattagtcaaggtgttttgatatggtattaaaatgtctaataaaagatggcactgcgtgattttattttaatgaagtgttatacaatcaagaaatgggggcaagggcctgccccccactccctcacctacctccttagcattccttcaggctgctactcggggctccaggtgtgtgaattggtcctcagatagtcaggcctgggtggagggagtggcaagtcaggcgtgcctcctacaagcttcctaacctcttaagcatcatggaaccagtcagccctctgtggagtcattgtgctggacctctgaaaagatctgcaggggccaagatgttgcagccaccggaggctgcaaggatgtgggttcttccaggtgtgggcccagcccccctccttccagcctttgctccccatcccacgttccactcgccctgcctgttgttcagtttgcgtctcagtgctgactcacgggcatgcttcattgaggcccaggaagaggccctggtttggggctgtgccagctcagagcccttgaaccagaaccaactgctcaggctcacaaaagttggcaaaatgcgggctgggcaggcagctcggggcagggagcagcagtgcaggcctggcctgtgtccccgtgcccagcgggctcccggagcagcattccagagcctcctgcagagccagcgaaggaaagctctagagggagacgactccaccgcctctctgctctgacccttctcaggcccgcctgatgtgctggaccatccccctgctgccacggcccctggctccgcagtcaccctccatcagatgcttccagaagcacctactctgtgcaagggcattcacaacaggccagtgggcaaacgtgagccagggccagcggagaaacactaaagaagactcggtggttcagagcctgggtctcagcgcgggacccgtctggggtgaagaccttggggctgttgtgagtcggtggcaggaacgtgggctctagactgtgcattcaggctctcctacttggcagaatgatcttggggaaacgacttcatctgaacttcagatatttcacatgtgaagcggggacaaaaccatgcagctcagaggtccctgtgggggctgggggagctgccctgcaggtcttggcacatgcacagcaggctccccatagctttgtcaccacaaagggcactgttctattcacagcacctcctgcttctgcctggcaactgtgtctccctgtgctatatttaattccaccagcaaagctggcgaggcagggcccagccctgaaggagatctccttgcctgacccctggacctggaaatggaggcttcatgtgcccgccttggcggcttaagcctgctgctttggcagtgccatgggtgagccgagcagctgtgaggtgggtggggcagggctgtagcccacgccgggtgctattccaggctctaggggctggtgctcatccccacccccagcgacttccgtcctacctggcatgctgcagccctctgccggctgtggtgtcctctgaatttggacccaggttgcctgctcttgttgtgggggtgggattggggctgtctgtgtttcccaggtggagctcatgtttgtgatcctctatctggacagctctccagaatcctgtgttgcccctgttctgcctttctgggatgggagagaaggtgagggagccggcgagcaggttctaccctctctgctaagggcctagcacactttgatgaggttcctggacgtgagaccctcacaaagaccaaccattcctctaatagccatttaacggtactgcagttcatgggaaaatgtcctcattcttaggagatagatgctggattatataggtgaatgccttcaagaaatgtgtaatttaattccaaatagttccccccaaaatacacaaagcaaataaggccaaaatgttcattgttgaatctgcagtggctggtatttcagtgaacagtgtacttgttctttcaacttttctgtatgtttggaatttttcttaataaaagattgtgggaaatggtc

SEQ ID NO: 4278 - protein, 155 aa, Homosapiens
MEPVSPLWSHCAGPLKRSAGAKMLQPPEAARMWVLPGVGPAPLLPAFAPHPTFHSPCLLFSLRLSADSRACFIEAQEEALVWGCASSEPLNQNQLLRLTKVGKMRAGQAARGREQQCRPGLCPRAQRAPGAAFQSLLQSQRRKALEGDDSTASLL

SEQ ID NO: 4279 - DNA, 5032 bp, Homosapiens
aaagacgcgggtgagtgtgtgatctgcctggaggagctgctgcagggggacacgatagccaggctgccctgcctgtgcatctatcacaaaaggtaggaggggttggcaaggtagcttagtgcaccccacctcccagaggggcggacccccatctccagccattctgtctcctttggttatgggatgacctctcccccgacctctggctccgagcgggtaagggcagaggccatcagacaggtgtccactgtgccggcgggaaggtgcgagcatcccaagtgcagagcagagtggagttgccagaggtgtgctctggtttgagggctcaggtggtgggagctgatggggagacccgtagagcctcacaggttggaggagcttcggatcccactgggaaggttggttctccgtctgtctccctgcctcttcttcctctacgggtccctctgctccacaggggtagaacatcaatctgtgcgaggaaggccaggcggagggtgtacccactgccttgcactggccttctccctagagggccgggaggcaggaagagccatttcctgtggggccacagcactgggcacagttaaaagtagcagggcccagatatgccttgggactccagtgtgagcctcgtccttgtttccagctggaaggaaggcaccctcttgcccaagacaggacactgtgctgcctggggccagcacctgttgaatcctcgagcccagagcttcttcctgacactcaggcctttcaaagcctgactctcagggccactgctgcacagggtgacaaccgggcatggcacgcagtgtggctggtgcagaggaggcttaaggctggcctgggagagattcttggtctagctcccagcacggagccttgcttgtgtcccagggcggcactaaccagaaccagaaaaggaaatctttggccctcggggagaattatgccaattatctgtctggttcctgtctttgaaaatgcccagatgttggtttacaaatcaggaagctgtcttggggcaatctctgttccctctttgatgcagagagcctttctctgtaaacactggagagcagggcttcactgtctggctcccctcccgcctcttgcaggaaggactagatgctgctgatcagctgatcatggctgagccgggtagagcttggggctctcctaagaggtcacccactgggagggagcttcacagctgttcttttgacccaggaaggagctctttcaggactgtggcacccagagccgtggccctcctgccatgccattgttcccacttccctgcccttgggagtcttggagacagctgactagctgccctgaggggtccaccgctctcaccttctcactggtggctgctgccattctcctgggctctgcacagaaagctttggtccttctgaaagccactctgccccttcctgcagcaccagatccccctgagccggtactgctgcctccacctgggccaagactagtcttggtgttcacccttcttcgtgcttcagaaagtagggatatctggggacatgactgtgtttccctggggtcctttcagaagagacttaggaagctcctgctcaggaatctggccctctgaaagagccccttcaaagcagcctgggcagcaggtaacgtggtttcccttgcggccccctcctcccagctgcatagactcgtggtttgaagtgaacagatcttgtccggaacaccctgcggactgacctgcgggcttgcttgctgactcctctcaaagggacagagcgcccctgctccagggaggaggctcaccggaccctggggcagagctgagcttgggacaccagcgggaacagggcaccccttctgcactgacttccagatcatggttctcccttcctccctgaggacaccaaattggatgagagcaagtttgagagaagaatgaatcaactgctatccttcccctcacccctcagcccaggagggaaagggcattttctttttcatctttgaaaggcattgtgggtctgtctttaaagtgtttacaaaaaaaaattatataaaaaaaaagtctagtgtcgactggtgttttccctcgtgatgtttacagcttgctgtttgctgcccagccataacccactcagtgacagacgaacacagctaaggcctcgctgccagccttctgacggcgggcgagcacacggtctcttcccctgccccaactggccctctccaccaccaacttctctactttgggtttgtttggttttttccctctatttttctggctggttttttgctcttttctccccttgagaccctaatatcttgacttcattgccaaaaaacaacccattgagaactttcttcctactgatcccatctcttttcccttctttcctcctggttccggtcagttcagaggatttaacaatcacaagtgtcctgcaaaaatgcctgaacattattcttaggccctcgtggattttttttttcagaaaacttaaacaaaaaaagacttactaagaaatatgtacagctacccctgttttcaggcactatgtttgagaacattttagccattgatgttcacacgtggcatcagcccatgcaagataggtttctgtatttatatattaaaatacaaaaaaaaacttataaaatgtttaaaaaaatgttcaaagcttgggagaaaagctttcttcattagtcaaggtgttttgatatggtattaaaatgtctaataaaagatggcactgcgtgattttattttaatgaagtgttatacaatcaagaaatgggggcaagggcctgccccccactccctcacctacctccttagcattccttcaggctgctactcggggctccaggtgtgtgaattggtcctcagatagtcaggcctgggtggagggagtggcaagtcaggcgtgcctcctacaagcttcctaacctcttaagcatcatggaaccagtcagccctctgtggagtcattgtgctggacctctgaaaagatctgcaggggccaagatgttgcagccaccggaggctgcaaggatgtgggttcttccaggtgtgggcccagcccccctccttccagcctttgctccccatcccacgttccactcgccctgcctgttgttcagtttgcgtctcagtgctgactcacgggcatgcttcattgaggcccaggaagaggccctggtttggggctgtgccagctcagagcccttgaaccagaaccaactgctcaggctcacaaaagttggcaaaatgcgggctgggcaggcagctcggggcagggagcagcagtgcaggcctggcctgtgtccccgtgcccagcgggctcccggagcagcattccagagcctcctgcagagccagcgaaggaaagctctagagggagacgactccaccgcctctctgctctgacccttctcaggcccgcctgatgtgctggaccatccccctgctgccacggcccctggctccgcagtcaccctccatcagatgcttccagaagcacctactctgtgcaagggcattcacaacaggccagtgggcaaacgtgagccagggccagcggagaaacactaaagaagactcggtggttcagagcctgggtctcagcgcgggacccgtctggggtgaagaccttggggctgttgtgagtcggtggcaggaacgtgggctctagactgtgcattcaggctctcctacttggcagaatgatcttggggaaacgacttcatctgaacttcagatatttcacatgtgaagcggggacaaaaccatgcagctcagaggtccctgtgggggctgggggagctgccctgcaggtcttggcacatgcacagcaggctccccatagctttgtcaccacaaagggcactgttctattcacagcacctcctgcttctgcctggcaactgtgtctccctgtgctatatttaattccaccagcaaagctggcgaggcagggcccagccctgaaggagatctccttgcctgacccctggacctggaaatggaggcttcatgtgcccgccttggcggcttaagcctgctgctttggcagtgccatgggtgagccgagcagctgtgaggtgggtggggcagggctgtagcccacgccgggtgctattccaggctctaggggctggtgctcatccccacccccagcgacttccgtcctacctggcatgctgcagccctctgccggctgtggtgtcctctgaatttggacccaggttgcctgctcttgttgtgggggtgggattggggctgtctgtgtttcccaggtggagctcatgtttgtgatcctctatctggacagctctccagaatcctgtgttgcccctgttctgcctttctgggatgggagagaaggtgagggagccggcgagcaggttctaccctctctgctaagggcctagcacactttgatgaggttcctggacgtgagaccctcacaaagaccaaccattcctctaatagccatttaacggtactgcagttcatgggaaaatgtcctcattcttaggagatagatgctggattatataggtgaatgccttcaagaaatgtgtaatttaattccaaatagttccccccaaaatacacaaagcaaataaggccaaaatgttcattgttgaatctgcagtggctggtatttcagtgaacagtgtacttgttctttcaacttttctgtatgtttggaatttttcttaataaaagattgtgggaaatggtcatttgctgagcgcctcctagttgccaggcactggagggcgcatcaaagaagagtcctacccaggagggagagcgcagctgctgcaggattctcgcctggaagagtgggtggctggctggctggctggaaggggaggggcgagagggctgtctcggtgatgagcacacgcgtgctggggtggtttggggagagggctgagatttgtcaccagtgagcccttggcacggtctctgctccccaccagggcagcacgggacagaaacgtcacggaggagtag

SEQ ID NO: 4280 - protein, 155 aa, Homosapiens; identical to SEQ ID NO: 4278

SEQ ID NO: 4281 - DNA, 2814 bp, Homosapiens
agggacagagcgcccctgctccagggaggaggctcaccggaccctggggcagagctgagcttgggacaccagcgggaacagggcaccccttctgcactgacttccagatcatggttctcccttcctccctgaggacaccaaattggatgagagcaagtttgagagaagaatgaatcaactgctatccttcccctcacccctcagcccaggagggaaagggcattttctttttcatctttgaaaggcattgtgggtctgtctttaaagtgtttacaaaaaaaaattatataaaaaaaaagtctagtgtcgactggtgttttccctcgtgatgtttacagcttgctgtttgctgcccagccataacccactcagtgacagacgaacacagctaaggcctcgctgccagccttctgacggcgggcgagcacacggtctcttcccctgccccaactggccctctccaccaccaacttctctactttgggtttgtttggttttttccctctatttttctggctggttttttgctcttttctccccttgagaccctaatatcttgacttcattgccaaaaaacaacccattgagaactttcttcctactgatcccatctcttttcccttctttcctcctggttccggtcagttcagaggatttaacaatcacaagtgtcctgcaaaaatgcctgaacattattcttaggccctcgtggattttttttttcagaaaacttaaacaaaaaaagacttactaagaaatatgtacagctacccctgttttcaggcactatgtttgagaacattttagccattgatgttcacacgtggcatcagcccatgcaagataggtttctgtatttatatattaaaatacaaaaaaaaacttataaaatgtttaaaaaaatgttcaaagcttgggagaaaagctttcttcattagtcaaggtgttttgatatggtattaaaatgtctaataaaagatggcactgcgtgattttattttaatgaagtgttatacaatcaagaaatgggggcaagggcctgccccccactccctcacctacctccttagcattccttcaggctgctactcggggctccaggtgtgtgaattggtcctcagatagtcaggcctgggtggagggagtggcaagtcaggcgtgcctcctacaagcttcctaacctcttaagcatcatggaaccagtcagccctctgtggagtcattgtgctggacctctgaaaagatctgcaggggccaagatgttgcagccaccggaggctgcaaggatgtgggttcttccaggtgtgggcccagcccccctccttccagcctttgctccccatcccacgttccactcgccctgcctgttgttcagtttgcgtctcagtgctgactcacgggcatgcttcattgaggcccaggaagaggccctggtttggggctgtgccagctcagagcccttgaaccagaaccaactgctcaggctcacaaaagttggcaaaatgcgggctgggcaggcagctcggggcagggagcagcagtgcaggcctggcctgtgtccccgtgcccagcgggctcccggagcagcattccagagcctcctgcagagccagcgaaggaaagctctagagggagacgactccaccgcctctctgctctgacccttctcaggcccgcctgatgtgctggaccatccccctgctgccacggcccctggctccgcagtcaccctccatcagatgcttccagaagcacctactctgtgcaagggcattcacaacaggccagtgggcaaacgtgagccagggccagcggagaaacactaaagaagactcggtggttcagagcctgggtctcagcgcgggacccgtctggggtgaagaccttggggctgttgtgagtcggtggcaggaacgtgggctctagactgtgcattcaggctctcctacttggcagaatgatcttggggaaacgacttcatctgaacttcagatatttcacatgtgaagcggggacaaaaccatgcagctcagaggtccctgtgggggctgggggagctgccctgcaggtcttggcacatgcacagcaggctccccatagctttgtcaccacaaagggcactgttctattcacagcacctcctgcttctgcctttctgggatgggagagaaggtgagggagccggcgagcaggttctaccctctctgctaagggcctagcacactttgatgaggttcctggacgtgagaccctcacaaagaccaaccattcctctaatagccatttaacggtactgcagttcatgggaaaatgtcctcattcttaggagatagatgctggattatataggtgaatgccttcaagaaatgtgtaatttaattccaaatagttccccccaaaatacacaaagcaaataaggccaaaatgttcattgttgaatctgcagtggctggtatttcagtgaacagtgtacttgttctttcaacttttctgtatgtttggaatttttcttaataaaagattgtgggaaatggtcatttgctgagcgcctcctagttgccaggcactggagggcgcatcaaagaagagtcctacccaggagggagagcgcagctgctgcaggattctcgcctggaagagtgggtggctggctggctggctggaaggggaggggcgagagggctgtctcggtgatgagcacacgcgtgctggggtggtttggggagagggctgagatttgtcaccagtgagcccttggcacggtctctgctccccaccagggcagcacgggacagaaacgtcacggaggagtag

SEQ ID NO: 4282 - protein, 72 aa, Homosapiens
MILGKRLHLNFRYFTCEAGTKPCSSEVPVGAGGAALQVLAHAQQAPHSFVTTKGTVLFTAPPASAFLGWERR

SEQ ID NO: 4283 - DNA, 2068 bp, Homosapiens
tggtcaccctgccacccagtgctcacaccctctggccagtgcctggctatggcccgactgctcaggtctgcaacctgggagctgttcccctggaggggctactgctcccagaaggcaaagggagagctctgcagggacttcgtagaggctctgaaggccgtggtgggcggctcccacgtgtccactgccgcggtggtccgagagcagcacgggcgcgatgagtcggtgcacaggtgcgaacctcctgatgctgtggtgtggccccagaacgtggagcaggtcagccggctggcagccctgtgctatcgccaaggtgtgcccatcatcccattcggcaccggcaccgggcttgagggtggcgtctgtgctgtgcagggcggcgtctgcgttaacctgacgcatatggaccgaatcctggagctgaaccaggaggacttctctgtggtggtggagccaggtgtcacccgcaaagccctcaacgcccacctgcgggacagcggcctctggtttcccgtggacccaggcgcggacgcctctctctgtggcatggcggccaccggggcgtcggggaccaacgcggtccgctacggcaccatgcgggacaacgtgctcaacctggaggtggtgctgcccgacgggcggctgctgcacacggcgggccgaggccggcatttccgcttcggcttctggccagaaatccctcatcacacagcctggtactcaccttgtgtgtccctgggacgtaggaagagtgcagccggctacaacctcacggggctcttcgtgggctccgaggggacgctgggcctcatcacagccaccaccctgcgcctgcaccctgcccctgaggccacagtggccgccacgtgtgcgttccccagtgtccaggctgctgtggacagcactgtacacatcctccaggctgcagtgcccgtagcccgcattgagttcctggatgaagtcatgatggatgcctgcaacaggtacagcaagctgaattgcttagtggcgcccacactcttcctggagttccatggctcccagcaggcactggaggagcagctgcagcgcacagaggagatagtccagcagaacggagcctctgacttctcctgggccaaggaggccgaggagcgcagccggctttggacagcacggcacaatgcctggtacgcagccctggccacgcggccaggctgcaagggctactccacggatgtgtgtgtgcccatctcccggctgccggagatcgtggtgcagaccaaggaggatctgaatgcctcaggactcacaggaagcattgtcgggcatgtgggtgacggcaacttccactgcatcctgctggtcaaccctgatgacgccgaggaactgggcagggtcaaggcttttgcagaacagctgggcaggcgggcactggctctccacggaacgtgcacgggggagcatggcatcggaatgggcaagcggcagctgctgcaggaggaggtgggcgccgtgggcgtggagaccatgcggcagctcaaggccgtgctagacccccaaggcctcatgaatccaggcaaagtgctgtgaagggggtctgagcacttagcccacaagttccctgactacggagccggttctggaacttttcttcatgccacggcccctgcaaggaaatagatgctgaggcagtcttcctgccagcgagcccactgtatctgggcccaaggccagagggcccagagagaagcctgagcaccgtgttacctccctggccctctggctggccccaggagcctttggttcagtaaacgacccagggtggttcccagcaaagctgcttcctctctgctcctacgcatcctgtcctggcgggaagagagcgtctgggtccattcaagactctgatgacacccctccccgaggcctcccactgccggggtcccaggacccttcccccttcacctggtgacaggaacactcctttcctggtatggaacgtgagctcccgtgacatgatgataggtcttctccttggggcctcccccaataaatctgtaataaacctgaaacccacctacagcta

SEQ ID NO: 4284 - protein, 507 aa, Homosapiens; identical to SEQ ID NO: 608

SEQ ID NO: 4285 - DNA, 2001 bp, Homosapiens
actggtcaccctgccacccagtgctcacaccctctggccagtgcctggctatggcccgactgctcaggtctgcaacctgggagctgttcccctggaggggctactgctcccagaaggcaaagggagagctctgcagggacttcgtagaggctctgaaggccgtggtgggcggctcccacgtgtccactgccgcggtggtccgagagcagcacgggcgcgatgagtcggtgcacaggtgcgaacctcctgatgctgtggtgtggccccagaacgtggagcaggtcagccggctggcagccctgtgctatcgccaaggtgtgcccatcatcccattcggcaccggcaccgggcttgagggtggcgtctgtgctgtgcagggcggcgtctgcgttaacctgacgcatatggaccgaatcctggagctgaaccaggaggacttctctgtggtggtggagccaggtgtcacccgcaaagccctcaacgcccacctgcgggacagcggcctctggtttcccgtggacccaggcgcggacgcctctctctgtggcatggcggccaccggggcgtcggggaccaacgcggtccgctacggcaccatgcgggacaacgtgctcaacctggaggtggtgctgcccgacgggcggctgctgcacacggcgggccgaggccggcatttccggaagagtgcagccggctacaacctcacggggctcttcgtgggctccgaggggacgctgggcctcatcacagccaccaccctgcgcctgcaccctgcccctgaggccacagtggccgccacgtgtgcgttccccagtgtccaggctgctgtggacagcactgtacacatcctccaggctgcagtgcccgtagcccgcattgagttcctggatgaagtcatgatggatgcctgcaacaggtacagcaagctgaattgcttagtggcgcccacactcttcctggagttccatggctcccagcaggcactggaggagcagctgcagcgcacagaggagatagtccagcagaacggagcctctgacttctcctgggccaaggaggccgaggagcgcagccggctttggacagcacggcacaatgcctggtacgcagccctggccacgcggccaggctgcaagggctactccacggatgtgtgtgtgcccatctcccggctgccggagatcgtggtgcagaccaaggaggatctgaatgcctcaggactcacaggaagcattgtcgggcatgtgggtgacggcaacttccactgcatcctgctggtcaaccctgatgacgccgaggaactgggcagggtcaaggcttttgcagaacagctgggcaggcgggcactggctctccacggaacgtgcacgggggagcatggcatcggaatgggcaagcggcagctgctgcaggaggaggtgggcgccgtgggcgtggagaccatgcggcagctcaaggccgtgctagacccccaaggcctcatgaatccaggcaaagtgctgtgaagggggtctgagcacttagcccacaagttccctgactacggagccggttctggaacttttcttcatgccacggcccctgcaaggaaatagatgctgaggcagtcttcctgccagcgagcccactgtatctgggcccaaggccagagggcccagagagaagcctgagcaccgtgttacctccctggccctctggctggccccaggagcctttggttcagtaaacgacccagggtggttcccagcaaagctgcttcctctctgctcctacgcatcctgtcctggcgggaagagagcgtctgggtccattcaagactctgatgacacccctccccgaggcctcccactgccggggtcccaggacccttcccccttcacctggtgacaggaacactcctttcctggtatggaacgtgagctcccgtgacatgatgataggtcttctccttggggcctcccccaataaatctgtaataaacctgaaacccacctacagcta

SEQ ID NO: 4286 - protein, 484 aa, Homosapiens; identical to SEQ ID NO: 610

SEQ ID NO: 4287 - DNA, 1822 bp, Homosapiens
tggtcaccctgccacccagtgctcacaccctctggccagtgcctggctatggcccgactgctcaggtctgcaacctgggagctgttcccctggaggggctactgctcccagaaggcaaagggagagctctgcagggacttcgtagaggctctgaaggccgtggtgggcggctcccacgtgtccactgccgcggtggtccgagagcagcacgggcgcgatgagtcggtgcacaggtgcgaacctcctgatgctgtggtgtggccccagaacgtggagcaggtcagccggctggcagccctgtgctatcgccaaggtgtgcccatcatcccattcggcaccggcaccgggcttgagggtggcgtctgtgctgtgcagggcggcgtctgcgttaacctgacgcatatggaccgaatcctggagctgaaccaggaggacttctctgtggtggtggagccaggtgtcacccgcaaagccctcaacgcccacctgcgggacagcggcctctggtttcccgtggacccaggcgcggacgcctctctctgtggcatggcggccaccggggcgtcggggaccaacgcggtccgctacggcaccatgcgggacaacgtgctcaacctggaggtggtgctgcccgacgggcggctgctgcacacggcgggccgaggccggcatttccgcttcggcttctggccagaaatccctcatcacacagcctggtactcaccttgtgtgtccctgggacgtaggaagagtgcagccggctacaacctcacggggctcttcgtgggctccgaggggacgctgggcctcatcacagccaccaccctgcgcctgcaccctgcccctgaggccacagtggccgccacgtgtgcgttccccagtgtccaggctgctgtggacagcactgtacacatcctccaggctgcagtgcccgtagcccgcattgagttcctggatgaagtcatgatggatgcctgcaacaggtacagcaagctgaattgcttagtggcgcccacactcttcctggagttccatggctcccagcaggcactggaggagcagctgcagcgcacagaggagatagtccagcagaacggagcctctgacttctcctgggccaaggaggccgaggagcgcagccggctttggacagcacggcacaatgcctggtacgcagccctggccacgcggccaggctgcaagggctactccacggatgtgtgtgtgcccatctcccggctgccggagatcgtggtgcagaccaaggaggatctgaatgcctcaggactcacaggaagcattgtcgggcatgtgggtgacggcaacttccactgcatcctgctggtcaaccctgatgacgccgaggaactgggcagggtcaaggcttttgcagaacagctgggcaggcgggcactggctctccacggaacgtgcacgggggagcatggcatcggaatgggcaagcggcagctgctgcaggaggaggtgggcgccgtgggcgtggagaccatgcggcagctcaaggccgtgctagacccccaaggcctcatgaatccaggcaaagtgctgtgaagggggtctgagcacttagcccacaagttccctgactacggagccggttctggaacttttcttcatgccacggcccctgcaaggaaatagatgctgaggcagtcttcctgccagcgagcccactgtatctgggcccaaggccagagggcccagagagaagcctgagcaccgtgttacctccctggccctctggctggccccaggagcctttggttcagtaaacgacccagggtggttcccagcaaagctg

SEQ ID NO: 4288 - protein, 507 aa, Homosapiens; identical to SEQ ID NO: 608

SEQ ID NO: 4289 - DNA, 779 bp, Homosapiens
ccagtgctcacaccctctggccagtgcctggctatggcccgactgctcaggtctgcaacctgggagctgttcccctggaggggctactgctcccagaaggcaaaggtaccgggagagaagagaagtcctctggagggatgagggagagctctgcagggacttcgtagaggctctgaaggccgtggtgggcggctcccacgtgtccactgccgcggtggtccgagagcagcacgggcgcgatgagtcggtgcacaggtgcgaacctcctgatgctgtggtgtggccccagaacgtggagcaggtcagccggctggcagccctgtgctatcgccaaggtgtgcccatcatcccattcggcaccggcaccgggcttgagggtggcgtctgtgctgtgcagggcggcgtctgcgttaacctgacgcatatggaccgaatcctggagctgaaccaggaggacttctctgtggtggtggagccaggtgtcacccgcaaagccctcaacgcccacctgcgggacagcggcctctggtttcccgtggacccaggcgcggacgcctctctctgtggcatggcggccaccggggcgtcggggaccaacgcggtccgctacggcaccatgcgggacaacgtgctcaacctggaggtggtgctgcccgacgggcggctgctgcacacggcgggccgaggccggcatttccggaagagtgcagccggctacaacctcacggggctcttcgtgggctccgaggggacgctgggcctcatcacagccaccaccc

SEQ ID NO: 4290 - protein, 117 aa, Homosapiens
MDRILELNQEDFSVVVEPGVTRKALNAHLRDSGLWFPVDPGADASLCGMAATGASGTNAVRYGTMRDNVLNLEVVLPDGRLLHTAGRGRHFRKSAAGYNLTGLFVGSEGTLGLITAT

SEQ ID NO: 4291 - DNA, 605 bp, Homosapiens
agtgctcacaccctctggccagtgcctggctatggcccgactgctcaggtctgcaacctgggagctgttcccctggaggggctactgctcccagaaggcaaagggagagctctgcagggacttcgtagaggctctgaaggccgtggtgggcggctcccacgtgtccactgccgcggtggtccgagagcagcacgggcgcgatgagtcggtgcacaggtgcgaacctcctgatgctgtggtgtggccccagaacgtggagcaggtcagccggctggcagccctgtgctatcgccaagggcggcgtctgcgttaacctgacgcatatggaccgaatcctggagctgaaccaggaggacttctctgtggtggtggagccaggtgtcacccgcaaagccctcaacgcccacctgcgggacagcggcctctggtttcccgtggacccaggcgcggacgcctctctctgtggcatggcggccaccggggcgtcggggaccaacgcggtccgctacggcaccatgcgggacaacgtgctcaacctggaggtggtgctgcccgacgggcggctgctgcacacggcgggccgaggccggcatttccggaagagt

SEQ ID NO: 4292 - protein, 134 aa, Homosapiens
MSRCTGANLLMLWCGPRTWSRSAGWQPCAIAKGGVCVNLTHMDRILELNQEDFSVVVEPGVTRKALNAHLRDSGLWFPVDPGADASLCGMAATGASGTNAVRYGTMRDNVLNLEVVLPDGRLLHTAGRGRHFRK

SEQ ID NO: 4293 - DNA, 740 bp, Homosapiens
cgcggtggtccgagagcagcacgggcgcgatgagtcggtgcacaggtgcgaacctcctgatgctgtggtgtggccccagaacgtggagcaggtcagccggctggcagccctgtgctatcgccaaggtgtgcccatcatcccattcggcaccggcaccgggcttgagggtggcgtctgtgctgtgcaggtacagtggggctccctcgcccggcccgaggatggtcccagcacaccttggcacacctgtggctgcctcccccgccacacacggcaccttgggtctgctcccgcccgtgggctgcctgcctctgggggtctggtctggctgctggggggacacccgcggggtgtggtccggggacgtggccaggtcagagacccaggtctgcagtggtcttagcacctgccccaaccagggcggcgtctgcgttaacctgacgcatatggaccgaatcctggagctgaaccaggaggacttctctgtggtggtggagccaggtgtcacccgcaaagccctcaacgcccacctgcgggacagcggcctctggtttcccgtggacccaggcgcggacgcctctctctgtggcatggcggccaccggggcgtcggggaccaacgcggtccgctacggcaccatgcgggacaacgtgctcaacctggaggtggtgctgcccgacgggcggctgctgcacacggcgggccgaggccggcatttccggtgagcgccctctgcggggggc

SEQ ID NO: 4294 - protein, 230 aa, Homosapiens
MSRCTGANLLMLWCGPRTWSRSAGWQPCAIAKVCPSSHSAPAPGLRVASVLCRYSGAPSPGPRMVPAHLGTPVAASPATHGTLGLLPPVGCLPLGVWSGCWGDTRGVWSGDVARSETQVCSGLSTCPNQGGVCVNLTHMDRILELNQEDFSVVVEPGVTRKALNAHLRDSGLWFPVDPGADASLCGMAATGASGTNAVRYGTMRDNVLNLEVVLPDGRLLHTAGRGRHFR

SEQ ID NO: 4295 - DNA, 261 bp, Homosapiens
gcgcgccggtggccgcccttcccccaccaccagcggcgagtgggtgacagagcccccgtctccgcgcgtcttcgccgccctgcgccgtgacccgctgtggcactgggccacgagtggaggctgcgcccctccaggtacgagaggggcttccaggagatgcgcctcagacgggcggcgaagggctcgggccgcgcgggagcgagttctggagccccggcgggcgcgcgcgcgcgggacgaggccccgccggggcgtggtggg

SEQ ID NO: 4296 - protein, 34 aa, Homosapiens
MRLRRAAKGSGRAGASSGAPAGARARDEAPPGRG

SEQ ID NO: 4297 - DNA, 3131 bp, Homosapiens
cttcccccaccaccagcggcgagtgggtgacagagcccccgtctccgcgcgtcttcgccgccctgcgccgtgacccgctgtggcactgggccacgagtggaggctgcgcccctccagttctgccttcatagttctctgcctttgcccaaaactgcagaaaatgaacaaatcccagggatcagtttcattcacggatgtgactgtggactttacccaggaggaatgggaacaactggacccctctcagaggatcctatacatggatgtgatgctggagaattatagcaacttactttcagtggaagtgtggaaggctgatgaccagatggagagagaccacagaaacccagacgagcaggcgaggcaatttttaattcttaagaaccaaaccccaattgaggaaagaggcgatctctttggaaaagcacttaatctgaacacagactttgtttctttaagacaagtaccttataaatatgacttatatgaaaaaactttgaaatataattcagacttgcttaatagtaatagaagctatgcaggaaagcagactgatgagtgtaatgaatttggaaaagcacttctctacctgaagcaagagaaaacccacagtggagtagaatattctgaatacaataaaagtggaaaagccctcagccataaagcagccatttttaaacatcagaaaataaaaaacttggttcaacctttcatttgtacttactgtgacaaggctttctcctttaagtcactcctcattagtcataagagaatacatactggagaaaagccatatgaatgcaatgtatgtaagaaaaccttctcccataaggccaacctcatcaaacatcagagaattcacactggggagaaacctttcgagtgtccggaatgtggaaaagctttcacccaccagtcaaacctcattgtacaccagagagcacatatggagaagaagccctatgagtgcagtgaatgtggaaagacatttgcccaaaagtttgaactcaccacacaccagagaattcatacaggagagcgaccctatgagtgtaacgaatgtgcaaaaaccttctttaagaagtcaaaccttatcatacatcagaagattcacacgggggagaaacgctatgagtgcagtgaatgtggaaaatcctttatccagaactcacagctcatcatacacatgagaactcatacaggagagaaaccctatgaatgtactgagtgcggcaaaactttcagccagaggtcaactcttagattacacttgcgaatccacacaggagagaaaccatatgagtgttccgaatgtgggaaggcctttagcaggaagtcccgactcagtgtccatcagagagttcacatcggggagaaaccctgaaactccagccaggtcttactgtggaaaactcctgccagaactcttcaagcgggtgaaaaacctcatgacagtattgagggaacatgggaattcatactgagatgcaatctctcaactcaaaaatgtattaaaaataggatcccatgagaacattatactggaagttacatgtgatacccagctaaagaatacatatcagaatatatccagttgtaaatagccatacccagttgtactacaatgagctttttaaaatcttgaatgaattgagtattctagacagcagcataagaaatatacaaacagtatcctatgaatttagtggttttatgtggatatgccacaaaacacaagtggtatgctttagatctgcacatgtgaatttagcataatcactgggaatttgaaattcttgtcctctgtgataattaggacataacaagattttccatactaaacatcacatgtgtttttcagtatctctgcaatccagtatgcattccaaatgaaatgtgtaacatttaaagtagcatggaacctacgtctttccctactgcttgctggcatatatcagttggtatgaacattgttcttgagctgcctcttaggaaacagaagacagtgttgaagttttccctgcttctggtttgctgaagattttctagaagcactatttacacaaatatgcaaatgtgaaataaccgatctataacgtgaaggaggcagacatgagctgtactactcagtatgcaccacagaataagagtttgccgtgtaaagacaatatccccattcgtcatgctcttattttcccgtgggatatttgcatacaaatgcatgtctgttaccaaaatattgtgtaacacagacagaaaccacctgtttttgtctttccttgtttcccttaatatttcatgaattgtctagcaaaaatggtaggatgcttctgtagttcacaaatgttacatttcagagactttagaggaaaaattattttaaataactgtcaactgtttcattgctttttaaatttttcacgtgcataaccccctttagaagtaaatttttacactattttgttgtttaaaggaggcatttctacttccttgagttttgctgttgccaacctaaaacatttccctttggaacatgagttataagttattacttttcctttacatgtttacacttttataaaaatcagatttttcagtggtctctccagatattaacaagaattgttgtgtaactcaaagatttgcttttatagacttgatttcaaattcttaagttcagcctttccctatcaatcacaaatcatgtattggaaattataaatggcaaccaaaaactggcttttaaaaaatatttttggatatcattgatgtgctgtcacactatatattgagtgactttctgaacaaatttatccagaacatccatagcccaataagcttttgtctaagttgtcatcttacttactcacaaaggaggggaaaacgttattttcatagctgcttttagaaatgtaaattgtaacagcctccttggacaacattgtgagtctgttttaacattaatatactcttacaacctaggaatctcctgggaatctatccctaaggaataaaaagcgccagcacttaagattatatgtttactaatgtatattgtattttttggtaaggaccaaaaaaacaaacaaaaaaaagaccatcagtaagggaatggatgaataaattgtggt

SEQ ID NO: 4298 - protein, 407 aa, Homosapiens
MNKSQGSVSFTDVTVDFTQEEWEQLDPSQRILYMDVMLENYSNLLSVEVWKADDQMERDHRNPDEQARQFLILKNQTPIEERGDLFGKALNLNTDFVSLRQVPYKYDLYEKTLKYNSDLLNSNRSYAGKQTDECNEFGKALLYLKQEKTHSGVEYSEYNKSGKALSHKAAIFKHQKIKNLVQPFICTYCDKAFSFKSLLISHKRIHTGEKPYECNVCKKTFSHKANLIKHQRIHTGEKPFECPECGKAFTHQSNLIVHQRAHMEKKPYECSECGKTFAQKFELTTHQRIHTGERPYECNECAKTFFKKSNLIIHQKIHTGEKRYECSECGKSFIQNSQLIIHMRTHTGEKPYECTECGKTFSQRSTLRLHLRIHTGEKPYECSECGKAFSRKSRLSVHQRVHIGEKP

SEQ ID NO: 4299 - DNA, 3284 bp, Homosapiens
cttcccccaccaccagcggcgagtgggtgacagagcccccgtctccgcgcgtcttcgccgccctgcgccgtgacccgctgtggcactgggccacgagtggaggctgcgcccctccagttctgccttcatagttctctgcctttgcccaaaactgcagaaaatgaacaaatcccagggatcagtttcattcacggatgtgactgtggactttacccaggaggaatgggaacaactggacccctctcagaggatcctatacatggatgtgatgctggagaattatagcaacttactttcagtggaagtgtggaaggctgatgaccagatggagagagaccacagaaacccagacgagcaggcgaggcaatttttaattcttaagaaccaaaccccaattgaggaaagaggcgatctctttggaaaagcacttaatctgaacacagactttgtttctttaagacaagtaccttataaatatgacttatatgaaaaaactttgaaatataattcagacttgcttaatagtaatagaagctatgcaggaaagcagactgatgagtgtaatgaatttggaaaagcacttctctacctgaagcaagagaaaacccacagtggagtagaatattctgaatacaataaaagtggaaaagccctcagccataaagcagccatttttaaacatcagaaaataaaaaacttggttcaacctttcatttgtacttactgtgacaaggctttctcctttaagtcactcctcattagtcataagagaatacatactggagaaaagccatatgaatgcaatgtatgtaagaaaaccttctcccataaggccaacctcatcaaacatcagagaattcacactggggagaaacctttcgagtgtccggaatgtggaaaagctttcacccaccagtcaaacctcattgtacaccagagagcacatatggagaagaagccctatgagtgcagtgaatgtggaaagacatttgcccaaaagtttgaactcaccacacaccagagaattcatacaggagagcgaccctatgagtgtaacgaatgtgcaaaaaccttctttaagaagtcaaaccttatcatacatcagaagattcacacgggggagaaacgctatgagtgcagtgaatgtggaaaatcctttatccagaactcacagctcatcatacacatgagaactcatacaggagagaaaccctatgaatgtactgagtgcggcaaaactttcagccagaggtcaactcttagattacacttgcgaatccacacaggagagaaaccatatgagtgttccgaatgtgggaaggcctttagcaggaagtcccgactcagtgtccatcagagagttcacatcggggagaaaccctgaaactccagccaggtcttactgtggaaaactcctgccagaactcttcaagcgggtgaaaaacctcatgacagtattgagggaacatgggaattcatactgagatgcaatctctcaactcaaaaatgtattaaaaataggatcccatgagaacattatactggaagttacatgtgatacccagctaaagaatacatatcagaatatatccagttgtaaatagccatacccagttgtactacaatgagctttttaaaatcttgaatgaattgagtattctagacagcagcataagaaatatacaaacagtatcctatgaatttagtggttttatgtggatatgccacaaaacacaagtggtatgctttagatctgcacatgtgaatttagcataatcactgggaatttgaaattcttgtcctctgtgataattaggacataacaagattttccatactaaacatcacatgtgtttttcagtatctctgcaatccagtatgcattccaaatgaaatgtgtaacatttaaagtagcatggaacctacgtctttccctactgcttgctggcatatatcagttggtatgaacattgttcttgagctgcctcttaggaaacagaagacagtgttgaagttttccctgcttctggtttgctgaagattttctagaagcactatttacacaaatatgcaaatgtgaaataaccgatctataacgtgaaggaggcagacatgagctgtactactcagtatgcaccacagaataagagtttgccgtgtaaagacaatatccccattcgtcatgctcttattttcccgtgggatatttgcatacaaatgcatgtctgttaccaaaatattgtgtaacacagacagaaaccacctgtttttgtctttccttgtttcccttaatatttcatgaattgtctagcaaaaatggtaggatgcttctgtagttcacaaatgttacatttcagagactttagaggaaaaattattttaaataactgtcaactgtttcattgctttttaaatttttcacgtgcataaccccctttagaagtaaatttttacactattttgttgtttaaaggaggcatttctacttccttgagttttgctgttgccaacctaaaacatttccctttggaacatgagttataagttattacttttcctttacatgtttacacttttataaaaatcagatttttcagtggtctctccagatattaacaagaattgttgtgtaactcaaagatttgcttttatagacttgatttcaaattcttaagttcagcctttccctatcaatcacaaatcatgtattggaaattataaatggcaaccaaaaactggcttttaaaaaatatttttggatatcattgatgtgctgtcacactatatattgagtgactttctgaacaaatttatccagaacatccatagcccaataagcttttgtctaagttgtcatcttacttactcacaaaggaggggaaaacgttattttcatagctgcttttagaaatgtaaattgtaacagcctccttggacaacattgtgagtctgttttaacattaatatactcttacaacctaggaatctcctgggaatctatccctaaggaataaaaagcgccagcacttaagattatatgtttactaatgtatattgtattttttggtaaggaccaaaaaaacaaacaaaaaaaagaccatcagtaagggaatggatgaataaattgtggtaaaaacataccatggctgaatggtatttccttgaaaagaatgtgtgggaacaaactccaaacttctctaggtcaaatgaggaaagcaagaggggagagagagagtgtatgtgtgtgtgtagcagtttttataaaataaagataaacccttata

SEQ ID NO: 4300 - protein, 407 aa, Homosapiens; identical to SEQ ID NO: 4298

SEQ ID NO: 4301 - DNA, 903 bp, Homosapiens
cggggaccggcagacaggcgtcctacacccctgccagcggcaccatggctttcctctggctcctctcctgctgggccctcctgggtaccaccttcggctgcggggtccccgccatccaccctgtgctcagcggcctgtccaggatcgtgaatggggaggacgccgtccccggctcctggccctggcaggtgtccctgcaggacaaaaccggcttccacttctgcgggggctccctcatcagcgaggactgggtggtcaccgctgcccactgcggggtcaggacctccgacgtggtcgtggctggggagtttgaccagggctctgacgaggagaacatccaggtcctgaagatcgccaaggtcttcaagaaccccaagttcagcattctgaccgtgaacaatgacatcaccctgctgaagctggccacacctgcccgcttctcccagacagtgtccgccgtgtgcctgcccagcgccgacgacgacttccccgcggggacactgtgtgccaccacaggctggggcaagaccaagtacaacgccaacaagacccctgacaagctgcagcaggcagccctgcccctcctgtccaatgccgaatgcaagaagtcctggggcaggaggatcaccgacgtgatgatctgtgccggggccagtggcgtctcctcctgcatgggtgactctggaggccccctggtctgccagaaggacggagcctggaccctggtgggcattgtgtcctggggcagccgcacctgctctaccaccacgcccgctgtgtacgcccgtgtcgccaagctcataccctgggtgcagaagatcctggccgccaactgagcccgcagctcctgccacccctgccttaagatttcccattaaatgcatctgtttagaagccctgact

SEQ ID NO: 4302 - protein, 263 aa, Homosapiens
MAFLWLLSCWALLGTTFGCGVPAIHPVLSGLSRIVNGEDAVPGSWPWQVSLQDKTGFHFCGGSLISEDWVVTAAHCGVRTSDVVVAGEFDQGSDEENIQVLKIAKVFKNPKFSILTVNNDITLLKLATPARFSQTVSAVCLPSADDDFPAGTLCATTGWGKTKYNANKTPDKLQQAALPLLSNAECKKSWGRRITDVMICAGASGVSSCMGDSGGPLVCQKDGAWTLVGIVSWGSRTCSTTTPAVYARVAKLIPWVQKILAAN

SEQ ID NO: 4303 - DNA, 477 bp, Homosapiens
accgtgaacaatgacatcaccctgagtgtccgccgtgtgcctgcccagcgccgacgacgacttccccgcggggacactgtgtgccaccacaggctggggcaagaccaagtacaacgccaacaagacccctgacaagctgcagcaggcagccctgcccctcctgtccaatgccgaatgcaagaagtcctggggcaggaggatcaccgacgtgatgatctgtgccggggccagtggcgtctcctcctgcatgggtgactctggaggccccctggtctgccagaaggacggagcctggaccctggtgggcattgtgtcctggggcagccgcacctgctctaccaccacgcccgctgtgtacgcccgtgtcgccaagctcataccctgggtgcagaagatcctggccgccaactgagcccgcagctcctgccacccctgccttaagatttcccattaaatgcatctgtttagaagccctga

SEQ ID NO: 4304 - protein, 66 aa, Homosapiens
MICAGASGVSSCMGDSGGPLVCQKDGAWTLVGIVSWGSRTCSTTTPAVYARVAKLIPWVQKILAAN

SEQ ID NO: 4305 - DNA, 406 bp, Homosapiens
cttcaagaaccccaagttcagcattctgaccgtgaacaatgacatcaccctgctgaagctggccacacctgcccgcttctcccagacagtgtccgccgtgtgcctgcccagcgccgacgacgacttccccgcggggacactgtgtgccaccacaggctggggcaagaccaagtacaacgggtgactctggaggccccctggtctgccagaaggacggagcctggaccctggtgggcattgtgtcctggggcagccgcacctgctctaccaccacgcccgctgtgtacgcccgtgtcgccaagctcataccctgggtgcagaagatcctggccgccaactgagcccgcagctcctgccacccctgccttaagatttcccattaaatgcatctgtttagaagccctga

SEQ ID NO: 4306 - protein, 120 aa, Homosapiens [sequence omitted]

SEQ ID NO: 4307 - DNA, 856 bp, Homosapiens
ggcatggcttccctctggctcctctcctgcttctcccttgtgggggccgcctttggctgcggggtccccgccatccaccctgtgctcagcggcctgtccaggatcgtgaatggggaggacgccgtccccggctcctggccctggcaggtgtccctgcaggacaaaaccggcttccacttctgcgggggctccctcatcagcgaggactgggtggtcaccgctgcccactgcggggtcaggacctccgacgtggtcgtggctggggagtttgaccagggctctgacgaggagaacatccaggtcctgaagatcgccaaggtcttcaagaaccccaagttcagcattctgaccgtgaacaatgacatcaccctgctgaagctggccacacctgcccgcttctcccagacagtgtccgccgtgtgcctgcccagcgccgacgacgacttccccgcggggacactgtgtgccaccacaggctggggcaagaccaagtacaacgccaacaagacccctgacaagctgcagcaggcagccctgcccctcctgtccaatgccgaatgcaagaagtcctggggcaggaggatcaccgacgtgatgatctgtgccggggccagtggcgtctcctcctgcatgggcgactctggcggccccctggtctgccaaaaggatggagcctggaccctggtgggcattgtgtcctggggcagcgacacctgctccacctccagccctggcgtgtacgcccgtgtcaccaagctcataccttgggtgcagaagatcctggctgccaactgagcccgcggctccctccgaccctgctccccacagagcctcagtaaacccatggaacacacgt

SEQ ID NO: 4308 - protein, 263 aa, Homosapiens
MASLWLLSCFSLVGAAFGCGVPAIHPVLSGLSRIVNGEDAVPGSWPWQVSLQDKTGFHFCGGSLISEDWVVTAAHCGVRTSDVVVAGEFDQGSDEENIQVLKIAKVFKNPKFSILTVNNDITLLKLATPARFSQTVSAVCLPSADDDFPAGTLCATTGWGKTKYNANKTPDKLQQAALPLLSNAECKKSWGRRITDVMICAGASGVSSCMGDSGGPLVCQKDGAWTLVGIVSWGSDTCSTSSPGVYARVTKLIPWVQKILAAN

SEQ ID NO: 4309 - DNA, 1326 bp, Homosapiens
ggcatggcttccctctggctcctctcctgcttctcccttgtgggggccgcctttggctgcggggtccccgccatccaccctgtgctcagcggcctgtccaggatcgtgaatggggaggacgccgtccccggctcctggccctggcaggtgtccctgcaggacaaaaccggcttccacttctgcgggggctccctcatcagcgaggactgggtggtcaccgctgcccactgcggggtcaggacctccgacgtggtcgtggctggggagtttgaccagggctctgacgaggagaacatccaggtcctgaagatcgccaaggtcttcaagaaccccaagttcagcattctgaccgtgaacaatgacatcaccctgctgaagctggccacacctgcccgcttctcccagacagtgtccgccgtgtgcctgcccagcgccgacgacgacttccccgcggggacactgtgtgccaccacaggctggggcaagaccaagtacaacgccaacaagacccctgacaagctgcagcaggcagccctgcccctcctgtccaatgccgaatgcaagaagtcctggggcaggaggatcaccgacgtgatgatctgtgccggggccagtggcgtctcctcctgcatgggcgactctggcggccccctggtctgccaaaaggatggagcctggaccctggtgggcattgtgtcctggggcagcgacacctgctccacctccagccctggcgtgtacgcccgtgtcaccaagctcataccttgggtgcagaagatcctggctgccaactgagcccgcggctccctccgaccctgctccccacagagcctcagtaaacccatggaacacacgtcggcgctgtccgtcttctgttttggggcctccaaggcctcactccactccggaacctgggcccccactgggctggactgggctgggctaggcatgggcggcctctgggaggacccttccttagtcccctctcccaccactcaggctcctgcttcccagagagtggccaggaacacacgggcagatgaaaaggggtgcagagacagacgggggatctggctggtggggaccgggtggaccttggcccccatcctcagcacctgcccccaggcgacaggttcttgccacccacccttgctctcttgctctgggccctgcaggagggcgtgggcagcgtgggggctgtggggggatgagctcactctggccccacagacctgtggctccaaggaatcttcccacggccactcctagggctgccagacatacgctggagccaggagcgttatcaacgcaaggactggtgatgag

SEQ ID NO: 4310 - protein, 263 aa, Homosapiens; identical to SEQ ID NO: 4308

SEQ ID NO: 4311 - DNA, 1348 bp, Homosapiens
cctcagcccttattcaccccactcccccccaggctgcggggtccccgccatccaccctgtgctcagcggcctgtccaggatcgtgaatggggaggacgccgtccccggctcctggccctggcaggtgtccctgcaggacaaaaccggcttccacttctgcgggggctccctcatcagcgaggactgggtggtcaccgctgcccactgcggggtcaggtgaggaccgggcagccttgggctccgcttccagcaccggtcgggtgggaggggagcagggcatgttctctcacccacaacgctctgcccaggacctccgacgtggtcgtggctggggagtttgaccagggctctgacgaggagaacatccaggtcctgaagatcgccaaggtcttcaagaaccccaagttcagcattctgaccgtgaacaatgacatcaccctgctgaagctggccacacctgcccgcttctcccagacagtgtccgccgtgtgcctgcccagcgccgacgacgacttccccgcggggacactgtgtgccaccacaggctggggcaagaccaagtacaacggtgaggggccgcggggctgcctctggggtctgggctgcctggccgtggagtccccccgtgaccgtttggctctaaattccaacacgctcctaactgcccgttcgttattgaaaatcttctgaatttaaaatcccccaaatgcaaataaaatccaggtcggatcatgaggagcctgcacagggagcttctgagcagcgcccggccgggtgagccctgccctggctgacctgcctggagtcgcagcgtggggctcccacccgggcagggccgaggcccccttgtcccacaggcgcttctgaggctccaggggccgtacccaacatcgtggtgatggtgcagggtagggcaggcgtgtcggccccgggtctctccctccactcttggctgagtgagcccaggggccctgaccctcctcctgtcctgcagccaacaagacccctgacaagctgcagcaggcagccctgcccctcctgtccaatgccgaatgcaagaagtcctggggcaggaggatcaccgacgtgatgatctgtgccggggccagtggcgtctcctcctgcatgggcgactctggcggccccctggtctgccaaaaggatggagcctggaccctggtgggcattgtgtcctggggcagcgacacctgctccacctccagccctggcgtgtacgcccgtgtcaccaagctcataccttgggtgcagaagatcctggctgccaactgagcccgcggctccctccgaccctgctccccacagagcctcagtaaacccatggaacaca

SEQ ID NO: 4312 - protein, 93 aa, Homosapiens
MQEVLGQEDHRRDDLCRGQWRLLLHGRLWRPPGLPKGWSLDPGGHCVLGQRHLLHLQPWRVRPCHQAHTLGAEDPGCQLSPRLPPTLLPTEPQ

SEQ ID NO: 4313 - DNA, 1821 bp, Homosapiens
cctcagcccttattcaccccactcccccccaggctgcggggtccccgccatccaccctgtgctcagcggcctgtccaggatcgtgaatggggaggacgccgtccccggctcctggccctggcaggtgtccctgcaggacaaaaccggcttccacttctgcgggggctccctcatcagcgaggactgggtggtcaccgctgcccactgcggggtcaggtgaggaccgggcagccttgggctccgcttccagcaccggtcgggtgggaggggagcagggcatgttctctcacccacaacgctctgcccaggacctccgacgtggtcgtggctggggagtttgaccagggctctgacgaggagaacatccaggtcctgaagatcgccaaggtcttcaagaaccccaagttcagcattctgaccgtgaacaatgacatcaccctgctgaagctggccacacctgcccgcttctcccagacagtgtccgccgtgtgcctgcccagcgccgacgacgacttccccgcggggacactgtgtgccaccacaggctggggcaagaccaagtacaacggtgaggggccgcggggctgcctctggggtctgggctgcctggccgtggagtccccccgtgaccgtttggctctaaattccaacacgctcctaactgcccgttcgttattgaaaatcttctgaatttaaaatcccccaaatgcaaataaaatccaggtcggatcatgaggagcctgcacagggagcttctgagcagcgcccggccgggtgagccctgccctggctgacctgcctggagtcgcagcgtggggctcccacccgggcagggccgaggcccccttgtcccacaggcgcttctgaggctccaggggccgtacccaacatcgtggtgatggtgcagggtagggcaggcgtgtcggccccgggtctctccctccactcttggctgagtgagcccaggggccctgaccctcctcctgtcctgcagccaacaagacccctgacaagctgcagcaggcagccctgcccctcctgtccaatgccgaatgcaagaagtcctggggcaggaggatcaccgacgtgatgatctgtgccggggccagtggcgtctcctcctgcatgggcgactctggcggccccctggtctgccaaaaggatggagcctggaccctggtgggcattgtgtcctggggcagcgacacctgctccacctccagccctggcgtgtacgcccgtgtcaccaagctcataccttgggtgcagaagatcctggctgccaactgagcccgcggctccctccgaccctgctccccacagagcctcagtaaacccatggaacacacgtcggcgctgtccgtcttctgttttggggcctccaaggcctcactccactccggaacctgggcccccactgggctggactgggctgggctaggcatgggcggcctctgggaggacccttccttagtcccctctcccaccactcaggctcctgcttcccagagagtggccaggaacacacgggcagatgaaaaggggtgcagagacagacgggggatctggctggtggggaccgggtggaccttggcccccatcctcagcacctgcccccaggcgacaggttcttgccacccacccttgctctcttgctctgggccctgcaggagggcgtgggcagcgtgggggctgtggggggatgagctcactctggccccacagacctgtggctccaaggaatcttcccacggccactcctagggctgccagacatacgctggagccaggagcgttatcaacgcaaggactggtgatgag

SEQ ID NO: 4314 - protein, 93 aa, Homosapiens; identical to SEQ ID NO: 4312

SEQ ID NO: 4315 - DNA, 186 bp, Homosapiens
ggctgcggggtccccgccatccaccctgtgctcagcggcctgtccaggatcgtgaatggggaggacgccgtccccggctcctggccctggcaggtgtccctgcaggacaaaaccggcttccacttctgcgggggctccctcatcagcgaggactgggtggtcaccgctgcccactgcggggtcagg

SEQ ID NO: 4316 - protein, 42 aa, Homosapiens
MGRTPSPAPGPGRCPCRTKPASTSAGAPSSARTGWSPLPTAG

SEQ ID NO: 4317 - DNA, 446 bp, Homosapiens
ggctgcggggtccccgccatccaccctgtgctcagcggcctgtccaggatcgtgaatggggaggacgccgtccccggctcctggccctggcaggtgtccctgcaggacaaaaccggcttccacttctgcgggggctccctcatcagcgaggactgggtggtcaccgctgcccactgcggggtcaggacctccgacgtggtcgtggctggggagtttgaccagggctctgacgaggagaacatccaggtcctgaagatcgccaaggtcttcaagaaccccaagttcagcattctgaccgtgaacaatgacatcaccctgctgaagctggccacacctgcccgcttctcccagacagtgtccgccgtgtgcctgcccagcgccgacgacgacttccccgcggggacactgtgtgccaccacaggctggggcaagaccaagtacaacgg

SEQ ID NO: 4318 - protein, 65 aa, Homosapiens
MGRTPSPAPGPGRCPCRTKPASTSAGAPSSARTGWSPLPTAGSGPPTWSWLGSLTRALTRRTSRS

SEQ ID NO: 4319 - DNA, 1027 bp, Homosapiens
gtgtcaccaagctcataccttgggtgcagaagatcctggctgccaactgagcccgcggctccctccgaccctgctccccacagagcctcagtaaacccatggaacacacgtcggcgctgtccgtcttctgttttggggcctccaaggcctcactccactccggaacctgggcccccactgggctggactgggctgggctaggcatgggcggcctctgggaggacccttccttagtcccctctcccaccactcaggctcctgcttcccagagagtggccaggaacacacgggcagatgaaaaggggtgcagagacagacgggggatctggctggtggggaccgggtggaccttggcccccatcctcagcacctgcccccaggcgacaggttcttgccacccacccttgctctcttgctctgggccctgcaggagggcgtgggcagcgtgggggctgtggggggatgagctcactctggccccacagacctgtggctccaaggaatcttcccacggccactcctagggctgccagacatacgctggagccaggagcgttatcaacgcaaggactggtgatgagtagagacggggtttcaccgtgttaaccaggatggtctcgatctcctgacctcgtcatccgcccgccttggcctcccaaagtgctgcgattacaggcctgagccaccgcgcccagccctatggcaatgactcttaaaagttcgaggctcaggcaggccgggagccccaggtcaaacatgcccatccccagccccaaatgcccagaagcaaaaagcccgccgtgccatgtttcatcaaggcaccacatcctccgtggccagatcgtcctccccttcctcctcacaccctgccagctggcccccgcccctctggccgctacccccaccccctcggccgtgcttggggcatctgtttcctcccttccttagcccccgcaccctcagaccctccacaccctacgattctgcctcctgaggggctcctgcatccacgccttttgcccacccc

SEQ ID NO: 4320 - protein, 103 aa, Homosapiens
MKRGAETDGGSGWWGPGGPWPPSSAPAPRRQVLATHPCSLALGPAGGRGQRGGCGGMSSLWPHRPVAPRNLPTATPRAARHTLEPGALSTQGLVMSRDGVSPC

SEQ ID NO: 4321 - DNA, 861 bp, Homosapiens
tgtccctgcagatcagagagagacttgggtctcactatgcggcccgactggccttgaagtttggcctcaagtgatcctcctgcctcagcctcccaaagtgctaggattacacagccctcgcccctcgggtcccttctgcccttgtgggagttgccagtcctcctatcctcccagtacaaagctggcttccacttctgcgggggctaccacatcagcgaggactgggtggtcaccgctgcccaccaggggtcaggaaaagggtcggaaatgaactgcaggctggggaaccagcacccccatcccccggccacaggcagagccgcctctgcaggtgacacccaccccaggccgtgcaccccacctccaccctcgcaggccacccagacggcagcttggggaaacctgggaggtcccgtaccctcactgtgcaggcacccccatgagcccaggcaccgcctgccaccctcactctccaggaagagccaccgcgtggtggccgggatcgtgtggtggccagggcgtctgaccttggctctcacccggaggccatccaggtgctgaggatggctaacgctaaggccacacagccagggagaggaggtggctcgtgacaccacgatgggacacacccacctctgggagaggagggtgactccgacagcccttgcctgccaggatggagcctggactctggagggcatcgtgtcctggagcagcaccagcacctcctgttgtcaccaggcgtggatgcccgcatcatgaaattcatgcctgggaaggcgtggaggccgagaccaccccccctaccccgcatctgtgtaaaacacaaataaagccattgagagcaactgcatacacctt

SEQ ID NO: 4322 - protein, 97 aa, Homosapiens
MNCRLGNQHPHPPATGRAASAGDTHPRPCTPPPPSQATQTAAWGNLGGPVPSLCRHPHEPRHRLPPSLSRKSHRVVAGIVWWPGRLTLALTRRPSRC

SEQ ID NO: 4323 - DNA, 912 bp, Homosapiens
ccgactggccttgaagtttggcctcaagtgatcctcctgcctcagcctcccaaagtgctaggattacacagccctcgcccctcgggtcccttctgcccttgtgggagttgccagtcctcctatcctcccagtacaaagctggcttccacttctgcgggggctaccacatcagcgaggactgggtggtcaccgctgcccaccaggggtcaggtgaggcttgagcttgaggagttggggcccaccaggtgtcagggaatgacactcatcccccttcccaaccccaactacaccctgcaaccaacaggaaaagggtcggaaatgaactgcaggctggggaaccagcacccccatcccccggccacaggcagagccgcctctgcaggtgacacccaccccaggccgtgcaccccacctccaccctcgcaggccacccagacggcagcttggggaaacctgggaggtcccgtaccctcactgtgcaggcacccccatgagcccaggcaccgcctgccaccctcactctccaggaagagccaccgcgtggtggccgggatcgtgtggtggccagggcgtctgaccttggctctcacccggaggccatccaggtgctgaggatggctaacgctaaggccacacagccagggagaggaggtggctcgtgacaccacgatgggacacacccacctctgggagaggagggtgactccgacagcccttgcctgccaggatggagcctggactctggagggcatcgtgtcctggagcagcaccagcacctcctgttgtcaccaggcgtggatgcccgcatcatgaaattcatgcctgggaaggcgtggaggccgagaccaccccccctaccccgcatctgtgtaaaacacaaataaagccattgagagcaactgcatacacctt

SEQ ID NO: 4324 - protein, 118 aa, Homosapiens
MTLIPLPNPNYTLQPTGKGSEMNCRLGNQHPHPPATGRAASAGDTHPRPCTPPPPSQATQTAAWGNLGGPVPSLCRHPHEPRHRLPPSLSRKSHRVVAGIVWWPGRLTLALTRRPSRC

SEQ ID NO: 4325 - DNA, 726 bp, Homosapiens
cccaaccccaactacaccctgcaaccaacaggaaaagggtcggaaatgaactgcaggctggggaaccagcacccccatcccccggccacaggcagagccgcctctgcaggtgacacccaccccaggccgtgcaccccacctccaccctcgcaggccacccagacggcagcttggggaaacctgggaggtcccgtaccctcactgtgcaggtggggaaatttagaccctgaaaaagggatgccctgagatcaccatgagattgaggggcaagcagggctcaccctgactggctcacttcccaggcacccccatgagcccaggcaccgcctgccaccctcactctccaggaagagccaccgcgtggtggccgggatcgtgtggtggccagggcgtctgaccttggctctcacccggaggccatccaggtgctgaggatggctaacgctaaggccacacagccagggagaggaggtggctcgtgacaccacgatgggacacacccacctctgggagaggagggtgactccgacagcccttgcctgccaggatggagcctggactctggagggcatcgtgtcctggagcagcaccagcacctcctgttgtcaccaggcgtggatgcccgcatcatgaaattcatgcctgggaaggcgtggaggccgagaccaccccccctaccccgcatctgtgtaaaacacaaataaagccattgagagcaactgcata

SEQ ID NO: 4326 - protein, 47 aa, Homosapiens
MGHTHLWERRVTPTALACQDGAWTLEGIVSWSSTSTSCCHQAWMPAS

SEQ ID NO: 4327 - DNA, 2725 bp, Homosapiens
cacagagctcagtcgcacacctgctgcagagtagaaagttcacacgtggtggtggtgctgggtggtaacagtgatggtggtgatgaggtggcagcggcggtgatggtgatgaaatcatgatatgatggtggtggcagtggcagtatcacagctaacctttcagtgagtgtctgcagtgacacaattatgtgaattaacacatgcaattctttgggaggaagctctcccaccttcaggcacaggggtggtcacctggctccagagccggctcgtcccagagctgtcatggataggaattgtgaaggatgtgtgtgctagggctgcgagtgtgtgtgcgcgtgtgtgtgcctgtgtgcgtgcctctgcatttgtatgtgtgcctgtgtgtgtgcgcgtgcctctgtgtgtgtgtctgtatgtgtgtacgtgtgtgtgtgtgtgtggctgggtgctgcccccagtccctggggtgggcagatggacagatggacagtcttgaccaccgcttgtcccccaggtctacgacgttcctccatcggtgagcaaggatgtgcccgatggcccactgctgcgtgaggagacctacgatgtgccccccgccttcgccaaggccaagccctttgacccggcccgcaccccactggtactggctgcgccccctccagactccccgccggccgaggacgtgtatgacgtgccgcccccggctcctgacctctacgacgtgccccctggcttgcggcggcctggcccgggcaccctgtacgatgtgccccgtgaacgggtgcttcctcctgaggtggctgatggtggcgtggtcgacagtggtgtgtatgcggtgcctcccccagctgaacgtgaagccccggcagagggcaagcgcctgtcggcctccagcaccggcagcacacgcagcagccagtctgcgtcctccttggaggtggcagggccgggccgggaacccctggagctggaagttgctgtggaggccctggcacggctgcagcagggtgtgagcgccaccgttgcccaccttctggacctggcaggcagcgccggtgcgactgggagctggcgtagcccctctgagccacaggagccgctggtgcaggacctgcaggctgctgtggccgctgtccagagtgccgtccacgagctgttggagtttgcccgcagcgcggtgggcaatgctgcccacacatctgaccgtgccctgcatgccaagcttagccggcagctgcagaagatggaggacgtgcaccagacgctggtggcacatggtcaggccctcgacgctggccggggaggctctggagccacccttgaggacctggaccggctggtggcctgctcgcgggctgtgcccgaggacgccaagcagctggcctccttcctgcacggcaatgcctcactgctcttcagacggaccaaggccactgccccggggcctgaggggggtggcaccctgcaccccaaccccactgacaagaccagcagcatccagtcacgacccctgccctcaccccctaagttcacctcccaggactcgccagatgggcagtacgagaacagcgaggggggctggatggaggactatgactacgtccacctacaggggaaggaggagtttgagaagacccagaaggagctgctggaaaagggcagcatcacgcggcagggcaagagccagctggagttgcagcagctgaagcagtttgaacgactggaacaggaggtgtcacggcccatagaccacgacctggccaactggacgccagcccaacccctggccccggggcgaacaggcggcctggggccctcggaccggcagctgctgctcttctacctggagcagtgtgaggccaacctgaccacactgaccaacgccgtggacgccttctttaccgccgtggccaccaaccagccgcccaagatctttgtggcgcacagcaagttcgtcatcctcagcgcccacaagctggtgttcatcggggacacactgtcacggcaggccaaggctgctgacgtgcgcagccaggtgacccactacagcaacctgctgtgcgacctcctgcgcggcatcgtggccaccaccaaggccgctgccttgcagtacccatcgccttccgcggcccaggacatggtggagagggtcaaggagctgggccacagcacccagcagttccgccgcgtcctaggccagctggcagccgcctgagggtggtgaccccaggagggaggcaggggaggggtgcggcggtcccagctccctggctcccatgtcaagagtcgctgtgccacaggcttagggacaggaccccagctctgcgtcggtcctggtgccctggatgcccaggaatctgtatatatttatggccgggcagggtgtggggccatgcctcctcaggagccgaagcccaggggccggccagtggccttccccagcatgcaccacgggcccgggttgggtcaccagacggggctggagtgtgagggtcctgcagcctgcaggacctcgtgccaccccgagggctgagcctggtcccacgagggtgccgtgtcccctgacagggccagtgcagtttggtgtgtcctccgccttaccaggagaagaacctgaagaactatttttcgttattggttttccaatcatttgactaagagtctccatttaaataaagtttttaaaaggaagagcagctgcctgagggtggcagatgagagc

SEQ ID NO: 4328 - protein, 323 aa, Homosapiens
MEDVHQTLVAHGQALDAGRGGSGATLEDLDRLVACSRAVPEDAKQLASFLHGNASLLFRRTKATAPGPEGGGTLHPNPTDKTSSIQSRPLPSPPKFTSQDSPDGQYENSEGGWMEDYDYVHLQGKEEFEKTQKELLEKGSITRQGKSQLELQQLKQFERLEQEVSRPIDHDLANWTPAQPLAPGRTGGLGPSDRQLLLFYLEQCEANLTTLTNAVDAFFTAVATNQPPKIFVAHSKFVILSAHKLVFIGDTLSRQAKAADVRSQVTHYSNLLCDLLRGIVATTKAAALQYPSPSAAQDMVERVKELGHSTQQFRRVLGQLAAA

SEQ ID NO: 4329 - DNA, 3057 bp, Homosapiens
agccgggactctgctaccaggcgtgctggagacctagtgggcccagttctgctgcgctgcggggggctctgccaggcctgcggctgctggggggtgctggcgcctctgccacccccatgctcagcgcccccctcacagcaccctcagcaagcagggctggctgcctgcctgcattgggagggcctctaggggttcaggggcactgggcccgggggaggggctgctttggcgctgctgccctgggggatgtgcggggaggccctgagtcaaccctgtcccagacatcccctttgatgaaggaacaaaaggtctttcagtggagagagctgaacagggagcctggtggtggaggcgtgtgggcgcagtgtgcccgggggctggagaatcccaccagggaggccttgacctccccaaggcagggagaccttcagggaaggaggctgcctggcatggcccctacccgcttcaggctggtgctggtgaggggtcctgtggccctgggcaggccattgtgctgcctgcctcttcacccactgtgcgggccttggcttccctgggctctgggtcatggtggtggtgcccacccgcgtggggcagggctatgtatacgaggccgcccagccggagcaggacgagtacgacatcccgcgacacctgctggccccggggccacaggacatctatgatgtgcccccggttcgggggctgcttcccagccagtatggccaggaggtgtatgacacaccccccatggctgtcaagggtcccaatggccgagacccgttgctggaggtgtatgacgtgccccccagtgtggagaagggcctgccaccgtccaaccaccacgcagtctacgacgttcctccatcggtgagcaaggatgtgcccgatggcccactgctgcgtgaggagacctacgatgtgccccccgccttcgccaaggccaagccctttgacccggcccgcaccccactggtactggctgcgccccctccagactccccgccggccgaggacgtgtatgacgtgccgcccccggctcctgacctctacgacgtgccccctggcttgcggcggcctggcccgggcaccctgtacgatgtgccccgtgaacgggtgcttcctcctgaggtggctgatggtggcgtggtcgacagtggtgtgtatgcggtgcctcccccagctgaacgtgaagccccggcagagggcaagcgcctgtcggcctccagcaccggcagcacacgcagcagccagtctgcgtcctccttggaggtggcagggccgggccgggaacccctggagctggaagttgctgtggaggccctggcacggctgcagcagggtgtgagcgccaccgttgcccaccttctggacctggcaggcagcgccggtgcgactgggagctggcgtagcccctctgagccacaggagccgctggtgcaggacctgcaggctgctgtggccgctgtccagagtgccgtccacgagctgttggagtttgcccgcagcgcggtgggcaatgctgcccacacatctgaccgtgccctgcatgccaagcttagccggcagctgcagaagatggaggacgtgcaccagacgctggtggcacatggtcaggccctcgacgctggccggggaggctctggagccacccttgaggacctggaccggctggtggcctgctcgcgggctgtgcccgaggacgccaagcagctggcctccttcctgcacggcaatgcctcactgctcttcagacggaccaaggccactgccccggggcctgaggggggtggcaccctgcaccccaaccccactgacaagaccagcagcatccagtcacgacccctgccctcaccccctaagttcacctcccaggactcgccagatgggcagtacgagaacagcgaggggggctggatggaggactatgactacgtccacctacaggggaaggaggagtttgagaagacccagaaggagctgctggaaaagggcagcatcacgcggcagggcaagagccagctggagttgcagcagctgaagcagtttgaacgactggaacaggaggtgtcacggcccatagaccacgacctggccaactggacgccagcccaacccctggccccggggcgaacaggcggcctggggccctcggaccggcagctgctgctcttctacctggagcagtgtgaggccaacctgaccacactgaccaacgccgtggacgccttctttaccgccgtggccaccaaccagccgcccaagatctttgtggcgcacagcaagttcgtcatcctcagcgcccacaagctggtgttcatcggggacacactgtcacggcaggccaaggctgctgacgtgcgcagccaggtgacccactacagcaacctgctgtgcgacctcctgcgcggcatcgtggccaccaccaaggccgctgccttgcagtacccatcgccttccgcggcccaggacatggtggagagggtcaaggagctgggccacagcacccagcagttccgccgcgtcctaggccagctggcagccgcctgagggtggtgaccccaggagggaggcaggggaggggtgcggcggtcccagctccctggctcccatgtcaagagtcgctgtgccacaggcttagggacaggaccccagctctgcgtcggtcctggtgccctggatgcccaggaatctgtatatatttatggccgggcagggtgtggggccatgcctcctcaggagccgaagcccaggggccggccagtggccttccccagcatgcaccacgggcccgggttgggtcaccagacggggctggagtgtgagggtcctgcagcctgcaggacctcgtgccaccccgagggctgagcctggtcccacgagggtgccgtgtcccctgacagggccagtgcagtttggtgtgtcctccgccttaccaggagaagaacctgaagaactatttttcgttattggttttccaatcatttgactaagagtctccatttaaataaagtttttaaaaggaagagcagctgcctgagggtggcagatgagagc

SEQ ID NO: 4330 - protein, 660 aa, Homosapiens
MVVVPTRVGQGYVYEAAQPEQDEYDIPRHLLAPGPQDIYDVPPVRGLLPSQYGQEVYDTPPMAVKGPNGRDPLLEVYDVPPSVEKGLPPSNHHAVYDVPPSVSKDVPDGPLLREETYDVPPAFAKAKPFDPARTPLVLAAPPPDSPPAEDVYDVPPPAPDLYDVPPGLRRPGPGTLYDVPRERVLPPEVADGGVVDSGVYAVPPPAEREAPAEGKRLSASSTGSTRSSQSASSLEVAGPGREPLELEVAVEALARLQQGVSATVAHLLDLAGSAGATGSWRSPSEPQEPLVQDLQAAVAAVQSAVHELLEFARSAVGNAAHTSDRALHAKLSRQLQKMEDVHQTLVAHGQALDAGRGGSGATLEDLDRLVACSRAVPEDAKQLASFLHGNASLLFRRTKATAPGPEGGGTLHPNPTDKTSSIQSRPLPSPPKFTSQDSPDGQYENSEGGWMEDYDYVHLQGKEEFEKTQKELLEKGSITRQGKSQLELQQLKQFERLEQEVSRPIDHDLANWTPAQPLAPGRTGGLGPSDRQLLLFYLEQCEANLTTLTNAVDAFFTAVATNQPPKIFVAHSKFVILSAHKLVFIGDTLSRQAKAADVRSQVTHYSNLLCDLLRGIVATTKAAALQYPSPSAAQDMVERVKELGHSTQQFRRVLGQLAAA

SEQ ID NO: 4331 - DNA, 3244 bp, Homosapiens
cgaggcggcagctgcgcggcggcaccggggcggctgcggcgcgctcggagccccgagggcacgcggcccgggcagctcggtgtgcgcccccgcgagagccggggccccaggcccgccggacaccatgaaccacctgaacgtgctggccaaagcgctctatgacaatgtggccgagtccccggatgagctctccttccgcaagggtgacatcatgacggtgctggagcaggacacgcagggcctggacggctggtggctctgctcgctgcatgggcgccagggcatcgtgcctgggaaccgcctcaagatcttggtgggcatgtatgataagaagccagcagggcctggccccggccctcccgccaccccggcccagcctcagcctggcctccatgccccagcgcctccggcctcccagtacacgcccatgctccccaacacctaccagccccagccagacagcgtctacctggtgcccactcccagcaaggctcagcaaggcctctaccaagtcccgggtcccagccctcagttccagtctcccccagccaagcagacatccaccttctcgaagcagacaccccatcacccgtttcccagcccggccacagacctgtaccaggtgcccccagggcctggaggccctgcccaggatatttaccaggtgccaccttctgccgggatggggcatgacatctaccaggtccccccgtccatggacacacgcagctgggagggcacgaagcccccggcaaaggtggtggtgcccacccgcgtggggcagggctatgtatacgaggccgcccagccggagcaggacgagtacgacatcccgcgacacctgctggccccggggccacaggacatctatgatgtgcccccggttcgggggctgcttcccagccagtatggccaggaggtgtatgacacaccccccatggctgtcaagggtcccaatggccgagacccgttgctggaggtgtatgacgtgccccccagtgtggagaagggcctgccaccgtccaaccaccacgcagtctacgacgttcctccatcggtgagcaaggatgtgcccgatggcccactgctgcgtgaggagacctacgatgtgccccccgccttcgccaaggccaagccctttgacccggcccgcaccccactggtactggctgcgccccctccagactccccgccggccgaggacgtgtatgacgtgccgcccccggctcctgacctctacgacgtgccccctggcttgcggcggcctggcccgggcaccctgtacgatgtgccccgtgaacgggtgcttcctcctgaggtggctgatggtggcgtggtcgacagtggtgtgtatgcggtgcctcccccagctgaacgtgaagccccggcagagggcaagcgcctgtcggcctccagcaccggcagcacacgcagcagccagtctgcgtcctccttggaggtggcagggccgggccgggaacccctggagctggaagttgctgtggaggccctggcacggctgcagcagggtgtgagcgccaccgttgcccaccttctggacctggcaggcagcgccggtgcgactgggagctggcgtagcccctctgagccacaggagccgctggtgcaggacctgcaggctgctgtggccgctgtccagagtgccgtccacgagctgttggagtttgcccgcagcgcggtgggcaatgctgcccacacatctgaccgtgccctgcatgccaagcttagccggcagctgcagaagatggaggacgtgcaccagacgctggtggcacatggtcaggccctcgacgctggccggggaggctctggagccacccttgaggacctggaccggctggtggcctgctcgcgggctgtgcccgaggacgccaagcagctggcctccttcctgcacggcaatgcctcactgctcttcagacggaccaaggccactgccccggggcctgaggggggtggcaccctgcaccccaaccccactgacaagaccagcagcatccagtcacgacccctgccctcaccccctaagttcacctcccaggactcgccagatgggcagtacgagaacagcgaggggggctggatggaggactatgactacgtccacctacaggggaaggaggagtttgagaagacccagaaggagctgctggaaaagggcagcatcacgcggcagggcaagagccagctggagttgcagcagctgaagcagtttgaacgactggaacaggaggtgtcacggcccatagaccacgacctggccaactggacgccagcccaacccctggccccggggcgaacaggcggcctggggccctcggaccggcagctgctgctcttctacctggagcagtgtgaggccaacctgaccacactgaccaacgccgtggacgccttctttaccgccgtggccaccaaccagccgcccaagatctttgtggcgcacagcaagttcgtcatcctcagcgcccacaagctggtgttcatcggggacacactgtcacggcaggccaaggctgctgacgtgcgcagccaggtgacccactacagcaacctgctgtgcgacctcctgcgcggcatcgtggccaccaccaaggccgctgccttgcagtacccatcgccttccgcggcccaggacatggtggagagggtcaaggagctgggccacagcacccagcagttccgccgcgtcctaggccagctggcagccgcctgagggtggtgaccccaggagggaggcaggggaggggtgcggcggtcccagctccctggctcccatgtcaagagtcgctgtgccacaggcttagggacaggaccccagctctgcgtcggtcctggtgccctggatgcccaggaatctgtatatatttatggccgggcagggtgtggggccatgcctcctcaggagccgaagcccaggggccggccagtggccttccccagcatgcaccacgggcccgggttgggtcaccagacggggctggagtgtgagggtcctgcagcctgcaggacctcgtgccaccccgagggctgagcctggtcccacgagggtgccgtgtcccctgacagggccagtgcagtttggtgtgtcctccgccttaccaggagaagaacctgaagaactatttttcgttattggttttccaatcatttgactaagagtctccatttaaataaagtttttaaaaggaagagcagctgcctgagggtggcagatgagagc

SEQ ID NO: 4332 - protein, 870 aa, Homosapiens; identical to SEQ ID NO: 618

SEQ ID NO: 4333 - DNA, 4686 bp, Homosapiens
actttcctgggaagttttcctctcgctgcggaacccccggggccctgactggccgcttcctccccgctggccgtagggagttttctgtccgacaccccctcttcctggccgggcagcctggcttcggcagacccccgggccatgtttccacacttgggcactggcatctctgagcatctcagtctcacctcctgagaacagcaagtgatcctggctaccccgggtaaccaggcctcaggtgcaggccccacatgacagatggacagactgaagtgggaggtgggaggcggacaccccggcgtcctgccaggaagggacaccatctgcacctggcgagctgtggcctccagccatcgtttccctgcctagttaggggcttttccctccagagccctgtccactctggccttgtttctggaactgctcctcacccggaggaccccatcctttccgtgaagcaggcagtgggggctttctggcaagtggcctcttcattaactatcccagagtgagtgcagatgaccagagggaagctggccaagtgcaaagcattgttattgtggaattaaagagcccgctcctgctcgcctccagaagtggtaatgtatttacagatgaaaaaatgagggcttccagactgtgctgatgtgagccccgccatccgttctggttcagagcataatcgtctcgtcttcagaaagaaggaagacagaacatgcctgccaagcccttcctctcttctgttctgctctcctggaaagttctggacttctctggcccagggcctcaggggactggccagccctgctcctgtgggcactgggcagagggacaaggcggaccacctgagcctgctggagggccggtatcccagggcagtagtgattagggaatgtcactctggccacatcccagcctgggcgggcctctatggggaggtccccgtttgatttggtttggttgtccacagtcagagccaagctctgggcatggagtctgggatggcaccctgaccccttgccttacaggactttgggcagccttctttggcactgtgcctcatctgtaacaagagaggaacagcgggctgggtaggacttggacagataggcactgtcgtggggacctgcagcctggccacaccatcacgggctctgagtcatctcctaccctctcccttgtagtcacagcccaggagaattctgctgggggtgggcagaggtctttgccatctgccccctacgtggctggctggcagatcaccgtggctctctctcctgggaccttgggcagtgtgtgaggtggtggggccaagaggagaattcatttttggaacagtcttgaagtgttcggaaaattgctttcatgtgctgaggaggccctgcggaggcttccagactgagctgcctgctcaagccctgcccttggaacccagagtggcgactgctcagggacacgtctgggttttaagcacacccatccatttgggcagtcttttcctagatgggctgacgcagcaggcactttggcccacagaaattataagatgcttcagaaggggatgggaggggaagcaggaacgtgctggccaaagcgctctatgacaatgtggccgagtccccggatgagctctccttccgcaagggtgacatcatgacggtgctggagcaggacacgcagggcctggacggctggtggctctgctcgctgcatgggcgccagggcatcgtgcctgggaaccgcctcaagatcttggtgggcatgtatgataagaagccagcagggcctggccccggccctcccgccaccccggcccagcctcagcctggcctccatgccccagcgcctccggcctcccagtacacgcccatgctccccaacacctaccagccccagccagacagcgtctacctggtgcccactcccagcaaggctcagcaaggcctctaccaagtcccgggtcccagccctcagttccagtctcccccagccaagcagacatccaccttctcgaagcagacaccccatcacccgtttcccagcccggccacagacctgtaccaggtgcccccagggcctggaggccctgcccaggatatttaccaggtgccaccttctgccgggatggggcatgacatctaccaggtccccccgtccatggacacacgcagctgggagggcacgaagcccccggcaaaggtggtggtgcccacccgcgtggggcagggctatgtatacgaggccgcccagccggagcaggacgagtacgacatcccgcgacacctgctggccccggggccacaggacatctatgatgtgcccccggttcgggggctgcttcccagccagtatggccaggaggtgtatgacacaccccccatggctgtcaagggtcccaatggccgagacccgttgctggaggtgtatgacgtgccccccagtgtggagaagggcctgccaccgtccaaccaccacgcagtctacgacgttcctccatcggtgagcaaggatgtgcccgatggcccactgctgcgtgaggagacctacgatgtgccccccgccttcgccaaggccaagccctttgacccggcccgcaccccactggtactggctgcgccccctccagactccccgccggccgaggacgtgtatgacgtgccgcccccggctcctgacctctacgacgtgccccctggcttgcggcggcctggcccgggcaccctgtacgatgtgccccgtgaacgggtgcttcctcctgaggtggctgatggtggcgtggtcgacagtggtgtgtatgcggtgcctcccccagctgaacgtgaagccccggcagagggcaagcgcctgtcggcctccagcaccggcagcacacgcagcagccagtctgcgtcctccttggaggtggcagggccgggccgggaacccctggagctggaagttgctgtggaggccctggcacggctgcagcagggtgtgagcgccaccgttgcccaccttctggacctggcaggcagcgccggtgcgactgggagctggcgtagcccctctgagccacaggagccgctggtgcaggacctgcaggctgctgtggccgctgtccagagtgccgtccacgagctgttggagtttgcccgcagcgcggtgggcaatgctgcccacacatctgaccgtgccctgcatgccaagcttagccggcagctgcagaagatggaggacgtgcaccagacgctggtggcacatggtcaggccctcgacgctggccggggaggctctggagccacccttgaggacctggaccggctggtggcctgctcgcgggctgtgcccgaggacgccaagcagctggcctccttcctgcacggcaatgcctcactgctcttcagacggaccaaggccactgccccggggcctgaggggggtggcaccctgcaccccaaccccactgacaagaccagcagcatccagtcacgacccctgccctcaccccctaagttcacctcccaggactcgccagatgggcagtacgagaacagcgaggggggctggatggaggactatgactacgtccacctacaggggaaggaggagtttgagaagacccagaaggagctgctggaaaagggcagcatcacgcggcagggcaagagccagctggagttgcagcagctgaagcagtttgaacgactggaacaggaggtgtcacggcccatagaccacgacctggccaactggacgccagcccaacccctggccccggggcgaacaggcggcctggggccctcggaccggcagctgctgctcttctacctggagcagtgtgaggccaacctgaccacactgaccaacgccgtggacgccttctttaccgccgtggccaccaaccagccgcccaagatctttgtggcgcacagcaagttcgtcatcctcagcgcccacaagctggtgttcatcggggacacactgtcacggcaggccaaggctgctgacgtgcgcagccaggtgacccactacagcaacctgctgtgcgacctcctgcgcggcatcgtggccaccaccaaggccgctgccttgcagtacccatcgccttccgcggcccaggacatggtggagagggtcaaggagctgggccacagcacccagcagttccgccgcgtcctaggccagctggcagccgcctgagggtggtgaccccaggagggaggcaggggaggggtgcggcggtcccagctccctggctcccatgtcaagagtcgctgtgccacaggcttagggacaggaccccagctctgcgtcggtcctggtgccctggatgcccaggaatctgtatatatttatggccgggcagggtgtggggccatgcctcctcaggagccgaagcccaggggccggccagtggccttccccagcatgcaccacgggcccgggttgggtcaccagacggggctggagtgtgagggtcctgcagcctgcaggacctcgtgccaccccgagggctgagcctggtcccacgagggtgccgtgtcccctgacagggccagtgcagtttggtgtgtcctccgccttaccaggagaagaacctgaagaactatttttcgttattggttttccaatcatttgactaagagtctccatttaaataaagtttttaaaaggaagagcagctgcctgagggtggcagatgagagc

SEQ ID NO: 4334 - protein, 841 aa, Homosapiens
MTVLEQDTQGLDGWWLCSLHGRQGIVPGNRLKILVGMYDKKPAGPGPGPPATPAQPQPGLHAPAPPASQYTPMLPNTYQPQPDSVYLVPTPSKAQQGLYQVPGPSPQFQSPPAKQTSTFSKQTPHHPFPSPATDLYQVPPGPGGPAQDIYQVPPSAGMGHDIYQVPPSMDTRSWEGTKPPAKVVVPTRVGQGYVYEAAQPEQDEYDIPRHLLAPGPQDIYDVPPVRGLLPSQYGQEVYDTPPMAVKGPNGRDPLLEVYDVPPSVEKGLPPSNHHAVYDVPPSVSKDVPDGPLLREETYDVPPAFAKAKPFDPARTPLVLAAPPPDSPPAEDVYDVPPPAPDLYDVPPGLRRPGPGTLYDVPRERVLPPEVADGGVVDSGVYAVPPPAEREAPAEGKRLSASSTGSTRSSQSASSLEVAGPGREPLELEVAVEALARLQQGVSATVAHLLDLAGSAGATGSWRSPSEPQEPLVQDLQAAVAAVQSAVHELLEFARSAVGNAAHTSDRALHAKLSRQLQKMEDVHQTLVAHGQALDAGRGGSGATLEDLDRLVACSRAVPEDAKQLASFLHGNASLLFRRTKATAPGPEGGGTLHPNPTDKTSSIQSRPLPSPPKFTSQDSPDGQYENSEGGWMEDYDYVHLQGKEEFEKTQKELLEKGSITRQGKSQLELQQLKQFERLEQEVSRPIDHDLANWTPAQPLAPGRTGGLGPSDRQLLLFYLEQCEANLTTLTNAVDAFFTAVATNQPPKIFVAHSKFVILSAHKLVFIGDTLSRQAKAADVRSQVTHYSNLLCDLLRGIVATTKAAALQYPSPSAAQDMVERVKELGHSTQQFRRVLGQLAAA

SEQ ID NO: 4335 - DNA, 3291 bp, Homosapiens
atgcgcggcgcggctggagcggccggacagtccggcgtccgggaacgctcaggagccggaggagccggaaagcgccgggacccctcgcggggcctctgagcggcgcgggcggacccgagcccccagcccgctggcgccgctgcccgccaggccccgggggcggcggccaagatgtccgtgcctaacgtgctggccaaagcgctctatgacaatgtggccgagtccccggatgagctctccttccgcaagggtgacatcatgacggtgctggagcaggacacgcagggcctggacggctggtggctctgctcgctgcatgggcgccagggcatcgtgcctgggaaccgcctcaagatcttggtgggcatgtatgataagaagccagcagggcctggccccggccctcccgccaccccggcccagcctcagcctggcctccatgccccagcgcctccggcctcccagtacacgcccatgctccccaacacctaccagccccagccagacagcgtctacctggtgcccactcccagcaaggctcagcaaggcctctaccaagtcccgggtcccagccctcagttccagtctcccccagccaagcagacatccaccttctcgaagcagacaccccatcacccgtttcccagcccggccacagacctgtaccaggtgcccccagggcctggaggccctgcccaggatatttaccaggtgccaccttctgccgggatggggcatgacatctaccaggtccccccgtccatggacacacgcagctgggagggcacgaagcccccggcaaaggtggtggtgcccacccgcgtggggcagggctatgtatacgaggccgcccagccggagcaggacgagtacgacatcccgcgacacctgctggccccggggccacaggacatctatgatgtgcccccggttcgggggctgcttcccagccagtatggccaggaggtgtatgacacaccccccatggctgtcaagggtcccaatggccgagacccgttgctggaggtgtatgacgtgccccccagtgtggagaagggcctgccaccgtccaaccaccacgcagtctacgacgttcctccatcggtgagcaaggatgtgcccgatggcccactgctgcgtgaggagacctacgatgtgccccccgccttcgccaaggccaagccctttgacccggcccgcaccccactggtactggctgcgccccctccagactccccgccggccgaggacgtgtatgacgtgccgcccccggctcctgacctctacgacgtgccccctggcttgcggcggcctggcccgggcaccctgtacgatgtgccccgtgaacgggtgcttcctcctgaggtggctgatggtggcgtggtcgacagtggtgtgtatgcggtgcctcccccagctgaacgtgaagccccggcagagggcaagcgcctgtcggcctccagcaccggcagcacacgcagcagccagtctgcgtcctccttggaggtggcagggccgggccgggaacccctggagctggaagttgctgtggaggccctggcacggctgcagcagggtgtgagcgccaccgttgcccaccttctggacctggcaggcagcgccggtgcgactgggagctggcgtagcccctctgagccacaggagccgctggtgcaggacctgcaggctgctgtggccgctgtccagagtgccgtccacgagctgttggagtttgcccgcagcgcggtgggcaatgctgcccacacatctgaccgtgccctgcatgccaagcttagccggcagctgcagaagatggaggacgtgcaccagacgctggtggcacatggtcaggccctcgacgctggccggggaggctctggagccacccttgaggacctggaccggctggtggcctgctcgcgggctgtgcccgaggacgccaagcagctggcctccttcctgcacggcaatgcctcactgctcttcagacggaccaaggccactgccccggggcctgaggggggtggcaccctgcaccccaaccccactgacaagaccagcagcatccagtcacgacccctgccctcaccccctaagttcacctcccaggactcgccagatgggcagtacgagaacagcgaggggggctggatggaggactatgactacgtccacctacaggggaaggaggagtttgagaagacccagaaggagctgctggaaaagggcagcatcacgcggcagggcaagagccagctggagttgcagcagctgaagcagtttgaacgactggaacaggaggtgtcacggcccatagaccacgacctggccaactggacgccagcccaacccctggccccggggcgaacaggcggcctggggccctcggaccggcagctgctgctcttctacctggagcagtgtgaggccaacctgaccacactgaccaacgccgtggacgccttctttaccgccgtggccaccaaccagccgcccaagatctttgtggcgcacagcaagttcgtcatcctcagcgcccacaagctggtgttcatcggggacacactgtcacggcaggccaaggctgctgacgtgcgcagccaggtgacccactacagcaacctgctgtgcgacctcctgcgcggcatcgtggccaccaccaaggccgctgccttgcagtacccatcgccttccgcggcccaggacatggtggagagggtcaaggagctgggccacagcacccagcagttccgccgcgtcctaggccagctggcagccgcctgagggtggtgaccccaggagggaggcaggggaggggtgcggcggtcccagctccctggctcccatgtcaagagtcgctgtgccacaggcttagggacaggaccccagctctgcgtcggtcctggtgccctggatgcccaggaatctgtatatatttatggccgggcagggtgtggggccatgcctcctcaggagccgaagcccaggggccggccagtggccttccccagcatgcaccacgggcccgggttgggtcaccagacggggctggagtgtgagggtcctgcagcctgcaggacctcgtgccaccccgagggctgagcctggtcccacgagggtgccgtgtcccctgacagggccagtgcagtttggtgtgtcctccgccttaccaggagaagaacctgaagaactatttttcgttattggttttccaatcatttgactaagagtctccatttaaataaagtttttaaaaggaagagcagctgcctgagggtggcagatgagagc

SEQ ID NO: 4336 - protein, 870 aa, Homosapiens
MSVPNVLAKALYDNVAESPDELSFRKGDIMTVLEQDTQGLDGWWLCSLHGRQGIVPGNRLKILVGMYDKKPAGPGPGPPATPAQPQPGLHAPAPPASQYTPMLPNTYQPQPDSVYLVPTPSKAQQGLYQVPGPSPQFQSPPAKQTSTFSKQTPHHPFPSPATDLYQVPPGPGGPAQDIYQVPPSAGMGHDIYQVPPSMDTRSWEGTKPPAKVVVPTRVGQGYVYEAAQPEQDEYDIPRHLLAPGPQDIYDVPPVRGLLPSQYGQEVYDTPPMAVKGPNGRDPLLEVYDVPPSVEKGLPPSNHHAVYDVPPSVSKDVPDGPLLREETYDVPPAFAKAKPFDPARTPLVLAAPPPDSPPAEDVYDVPPPAPDLYDVPPGLRRPGPGTLYDVPRERVLPPEVADGGVVDSGVYAVPPPAEREAPAEGKRLSASSTGSTRSSQSASSLEVAGPGREPLELEVAVEALARLQQGVSATVAHLLDLAGSAGATGSWRSPSEPQEPLVQDLQAAVAAVQSAVHELLEFARSAVGNAAHTSDRALHAKLSRQLQKMEDVHQTLVAHGQALDAGRGGSGATLEDLDRLVACSRAVPEDAKQLASFLHGNASLLFRRTKATAPGPEGGGTLHPNPTDKTSSIQSRPLPSPPKFTSQDSPDGQYENSEGGWMEDYDYVHLQGKEEFEKTQKELLEKGSITRQGKSQLELQQLKQFERLEQEVSRPIDHDLANWTPAQPLAPGRTGGLGPSDRQLLLFYLEQCEANLTTLTNAVDAFFTAVATNQPPKIFVAHSKFVILSAHKLVFIGDTLSRQAKAADVRSQVTHYSNLLCDLLRGIVATTKAAALQYPSPSAAQDMVERVKELGHSTQQFRRVLGQLAAA

SEQ ID NO: 4337 - DNA, 3244 bp, Homosapiens
gcctgccaggagtgggtgagggaggagcagccgccgccttcacagacacctggtagtgtcaggagagggcatgcactgccctggtgaggctcctctggctgcccccaggcccacacccaaggatccctgcctcagaaacgtgctggccaaagcgctctatgacaatgtggccgagtccccggatgagctctccttccgcaagggtgacatcatgacggtgctggagcaggacacgcagggcctggacggctggtggctctgctcgctgcatgggcgccagggcatcgtgcctgggaaccgcctcaagatcttggtgggcatgtatgataagaagccagcagggcctggccccggccctcccgccaccccggcccagcctcagcctggcctccatgccccagcgcctccggcctcccagtacacgcccatgctccccaacacctaccagccccagccagacagcgtctacctggtgcccactcccagcaaggctcagcaaggcctctaccaagtcccgggtcccagccctcagttccagtctcccccagccaagcagacatccaccttctcgaagcagacaccccatcacccgtttcccagcccggccacagacctgtaccaggtgcccccagggcctggaggccctgcccaggatatttaccaggtgccaccttctgccgggatggggcatgacatctaccaggtccccccgtccatggacacacgcagctgggagggcacgaagcccccggcaaaggtggtggtgcccacccgcgtggggcagggctatgtatacgaggccgcccagccggagcaggacgagtacgacatcccgcgacacctgctggccccggggccacaggacatctatgatgtgcccccggttcgggggctgcttcccagccagtatggccaggaggtgtatgacacaccccccatggctgtcaagggtcccaatggccgagacccgttgctggaggtgtatgacgtgccccccagtgtggagaagggcctgccaccgtccaaccaccacgcagtctacgacgttcctccatcggtgagcaaggatgtgcccgatggcccactgctgcgtgaggagacctacgatgtgccccccgccttcgccaaggccaagccctttgacccggcccgcaccccactggtactggctgcgccccctccagactccccgccggccgaggacgtgtatgacgtgccgcccccggctcctgacctctacgacgtgccccctggcttgcggcggcctggcccgggcaccctgtacgatgtgccccgtgaacgggtgcttcctcctgaggtggctgatggtggcgtggtcgacagtggtgtgtatgcggtgcctcccccagctgaacgtgaagccccggcagagggcaagcgcctgtcggcctccagcaccggcagcacacgcagcagccagtctgcgtcctccttggaggtggcagggccgggccgggaacccctggagctggaagttgctgtggaggccctggcacggctgcagcagggtgtgagcgccaccgttgcccaccttctggacctggcaggcagcgccggtgcgactgggagctggcgtagcccctctgagccacaggagccgctggtgcaggacctgcaggctgctgtggccgctgtccagagtgccgtccacgagctgttggagtttgcccgcagcgcggtgggcaatgctgcccacacatctgaccgtgccctgcatgccaagcttagccggcagctgcagaagatggaggacgtgcaccagacgctggtggcacatggtcaggccctcgacgctggccggggaggctctggagccacccttgaggacctggaccggctggtggcctgctcgcgggctgtgcccgaggacgccaagcagctggcctccttcctgcacggcaatgcctcactgctcttcagacggaccaaggccactgccccggggcctgaggggggtggcaccctgcaccccaaccccactgacaagaccagcagcatccagtcacgacccctgccctcaccccctaagttcacctcccaggactcgccagatgggcagtacgagaacagcgaggggggctggatggaggactatgactacgtccacctacaggggaaggaggagtttgagaagacccagaaggagctgctggaaaagggcagcatcacgcggcagggcaagagccagctggagttgcagcagctgaagcagtttgaacgactggaacaggaggtgtcacggcccatagaccacgacctggccaactggacgccagcccaacccctggccccggggcgaacaggcggcctggggccctcggaccggcagctgctgctcttctacctggagcagtgtgaggccaacctgaccacactgaccaacgccgtggacgccttctttaccgccgtggccaccaaccagccgcccaagatctttgtggcgcacagcaagttcgtcatcctcagcgcccacaagctggtgttcatcggggacacactgtcacggcaggccaaggctgctgacgtgcgcagccaggtgacccactacagcaacctgctgtgcgacctcctgcgcggcatcgtggccaccaccaaggccgctgccttgcagtacccatcgccttccgcggcccaggacatggtggagagggtcaaggagctgggccacagcacccagcagttccgccgcgtcctaggccagctggcagccgcctgagggtggtgaccccaggagggaggcaggggaggggtgcggcggtcccagctccctggctcccatgtcaagagtcgctgtgccacaggcttagggacaggaccccagctctgcgtcggtcctggtgccctggatgcccaggaatctgtatatatttatggccgggcagggtgtggggccatgcctcctcaggagccgaagcccaggggccggccagtggccttccccagcatgcaccacgggcccgggttgggtcaccagacggggctggagtgtgagggtcctgcagcctgcaggacctcgtgccaccccgagggctgagcctggtcccacgagggtgccgtgtcccctgacagggccagtgcagtttggtgtgtcctccgccttaccaggagaagaacctgaagaactatttttcgttattggttttccaatcatttgactaagagtctccatttaaataaagtttttaaaaggaagagcagctgcctgagggtggcagatgagagc

SEQ ID NO: 4338 - protein, 888 aa, Homosapiens
MHCPGEAPLAAPRPTPKDPCLRNVLAKALYDNVAESPDELSFRKGDIMTVLEQDTQGLDGWWLCSLHGRQGIVPGNRLKILVGMYDKKPAGPGPGPPATPAQPQPGLHAPAPPASQYTPMLPNTYQPQPDSVYLVPTPSKAQQGLYQVPGPSPQFQSPPAKQTSTFSKQTPHHPFPSPATDLYQVPPGPGGPAQDIYQVPPSAGMGHDIYQVPPSMDTRSWEGTKPPAKVVVPTRVGQGYVYEAAQPEQDEYDIPRHLLAPGPQDIYDVPPVRGLLPSQYGQEVYDTPPMAVKGPNGRDPLLEVYDVPPSVEKGLPPSNHHAVYDVPPSVSKDVPDGPLLREETYDVPPAFAKAKPFDPARTPLVLAAPPPDSPPAEDVYDVPPPAPDLYDVPPGLRRPGPGTLYDVPRERVLPPEVADGGVVDSGVYAVPPPAEREAPAEGKRLSASSTGSTRSSQSASSLEVAGPGREPLELEVAVEALARLQQGVSATVAHLLDLAGSAGATGSWRSPSEPQEPLVQDLQAAVAAVQSAVHELLEFARSAVGNAAHTSDRALHAKLSRQLQKMEDVHQTLVAHGQALDAGRGGSGATLEDLDRLVACSRAVPEDAKQLASFLHGNASLLFRRTKATAPGPEGGGTLHPNPTDKTSSIQSRPLPSPPKFTSQDSPDGQYENSEGGWMEDYDYVHLQGKEEFEKTQKELLEKGSITRQGKSQLELQQLKQFERLEQEVSRPIDHDLANWTPAQPLAPGRTGGLGPSDRQLLLFYLEQCEANLTTLTNAVDAFFTAVATNQPPKIFVAHSKFVILSAHKLVFIGDTLSRQAKAADVRSQVTHYSNLLCDLLRGIVATTKAAALQYPSPSAAQDMVERVKELGHSTQQFRRVLGQLAAA

SEQ ID NO: 4339 - DNA, 320 bp, Homosapiens
ggaagccaccttctctgtgtgtccccgcatgtgccagcctgggggggctgtgtcccacatatgccagcatgcaccacgggcccgggttgggtcaccagacggggctggagtgtgagggtcctgcagcctgcaggacctcgtgccaccccgagggctgagcctggtcccacgagggtgccgtgtcccctgacagggccagtgcagtttggtgtgtcctccgccttaccaggagaagaacctgaagaactatttttcgttattggttttccaatcatttgactaagagtctccatttaaataaagtttttaaaaggaagagc

SEQ ID NO: 4340 - protein, 72 aa, Homosapiens
MPACTTGPGWVTRRGWSVRVLQPAGPRATPRAEPGPTRVPCPLTGPVQFGVSSALPGEEPEELFFVIGFPII

SEQ ID NO: 4341 - DNA, 3155 bp, Homosapiens
cgaggcggcagctgcgcggcggcaccggggcggctgcggcgcgctcggagccccgagggcacgcggcccgggcagctcggtgtgcgcccccgcgagagccggggccccaggcccgccggacaccatgaaccacctgaacgtgctggccaaagcgctctatgacaatgtggccgagtccccggatgagctctccttccgcaagggtgacatcatgacggtgctggagcaggacacgcagggcctggacggctggtggctctgctcgctgcatgggcgccagggcatcgtgcctgggaaccgcctcaagatcttggtgggcatgtatgataagaagccagcagggcctggccccggccctcccgccaccccggcccagcctcagcctggcctccatgccccagcgcctccggcctcccagtacacgcccatgctccccaacacctaccagccccagccagacagcgtctacctggtgcccactcccagcaaggctcagcaaggcctctaccaagtcccgggtcccagccctcagttccagtctcccccagccaagcagacatccaccttctcgaagcagacaccccatcacccgtttcccagcccggccacagacctgtaccaggtgcccccagggcctggaggccctgcccaggatatttaccaggtgccaccttctgccgggatggggcatgacatctaccaggtccccccgtccatggacacacgcagctgggagggcacgaagcccccggcaaaggtggtggtgcccacccgcgtggggcagggctatgtatacgaggccgcccagccggagcaggacgagtacgacatcccgcgacacctgctggccccggggccacaggacatctatgatgtgcccccggttcgggggctgcttcccagccagtatggccaggaggtgtatgacacaccccccatggctgtcaagggtcccaatggccgagacccgttgctggaggtgtatgacgtgccccccagtgtggagaagggcctgccaccgtccaaccaccacgcagtctacgacgttcctccatcggtgagcaaggatgtgcccgatggcccactgctgcgtgaggagacctacgatgtgccccccgccttcgccaaggccaagccctttgacccggcccgcaccccactggtactggctgcgccccctccagactccccgccggccgaggacgtgtatgacgtgccgcccccggctcctgacctctacgacgtgccccctggcttgcggcggcctggcccgggcaccctgtacgatgtgccccgtgaacgggtgcttcctcctgaggtggctgatggtggcgtggtcgacagtggtgtgtatgcggtgcctcccccagctgaacgtgaagccccggcagagggcaagcgcctgtcggcctccagcaccggcagcacacgcagcagccagtctgcgtcctccttggaggtggcagggccgggccgggaacccctggagctggaagttgctgtggaggccctggcacggctgcagcagggtgtgagcgccaccgttgcccaccttctggacctggcaggcagcgccggtgcgactgggagctggcgtagcccctctgagccacaggagccgctggtgcaggacctgcaggctgctgtggccgctgtccagagtgccgtccacgagctgttggagtttgcccgcagcgcggtgggcaatgctgcccacacatctgaccgtgccctgcatgccaagcttagccggcagctgcagaagatggaggacgtgcaccagacgctggtggcacatggtcaggccctcgacgctggccggggaggctctggagccacccttgaggacctggaccggctggtggcctgctcgcgggctgtgcccgaggacgccaagcagctggcctccttcctgcacggcaatgcctcactgctcttcagacggaccaaggccactgccccggggcctgaggggggtggcaccctgcaccccaaccccactgacaagaccagcagcatccagtcacgacccctgccctcaccccctaagttcacctcccaggactcgccagatgggcagtacgagaacagcgaggggggctggatggaggactatgactacgtccacctacaggggaaggaggagtttgagaagacccagaaggagctgctggaaaagggcagcatcacgcggcagggcaagagccagctggagttgcagcagctgaagcagtttgaacgactggaacaggaggtgtcacggcccatagaccacgacctggccaactggacgccagcccaacccctggccccggggcgaacaggcggcctggggccctcggaccggcagctgctgctcttctacctggagcagtgtgaggccaacctgaccacactgaccaacgccgtggacgccttctttaccgccgtggccaccaaccagccgcccaagatctttgtggcgcacagcaagttcgtcatcctcagcgcccacaagctggtgttcatcggggacacactgtcacggcaggccaaggctgctgacgtgcgcagccaggtgacccactacagcaacctgctgtgcgacctcctgcgcggcatcgtggccaccaccaaggccgctgccttgcagtacccatcgccttccgcggcccaggacatggtggagagggtcaaggagctgggccacagcacccagcagttccgccgcgtcctaggccagctggcagccgcctgagggtggtgaccccaggagggaggcaggggaggggtgcggcggtcccagctccctggctcccatgtcaagagtcgctgtgccacaggcttagggacaggaccccagctctgcgtcggtcctggtgccctggatgcccaggaatctgtatatatttatggccgggcagggtgtggggccatgcctcctcaggagccgaagcccaggggccggccagtggccttccccagcatgcaccacgggcccgggttgggtcaccagacggggctggagtgtgagggtcctgcagcctgcaggacctcgtgccaccccgagggctgagcctggtcccacgagggtgccgtgtcccctgacagggccagtgcagtttggtgtgtcctccgccttaccaggagaagaacctgaagaactatttttcgtt

SEQ ID NO: 4342 - protein, 870 aa, Homosapiens; identical to SEQ ID NO: 618

SEQ ID NO: 4343 - DNA, 3202 bp, Homosapiens
atgcgcggcgcggctggagcggccggacagtccggcgtccgggaacgctcaggagccggaggagccggaaagcgccgggacccctcgcggggcctctgagcggcgcgggcggacccgagcccccagcccgctggcgccgctgcccgccaggccccgggggcggcggccaagatgtccgtgcctaacgtgctggccaaagcgctctatgacaatgtggccgagtccccggatgagctctccttccgcaagggtgacatcatgacggtgctggagcaggacacgcagggcctggacggctggtggctctgctcgctgcatgggcgccagggcatcgtgcctgggaaccgcctcaagatcttggtgggcatgtatgataagaagccagcagggcctggccccggccctcccgccaccccggcccagcctcagcctggcctccatgccccagcgcctccggcctcccagtacacgcccatgctccccaacacctaccagccccagccagacagcgtctacctggtgcccactcccagcaaggctcagcaaggcctctaccaagtcccgggtcccagccctcagttccagtctcccccagccaagcagacatccaccttctcgaagcagacaccccatcacccgtttcccagcccggccacagacctgtaccaggtgcccccagggcctggaggccctgcccaggatatttaccaggtgccaccttctgccgggatggggcatgacatctaccaggtccccccgtccatggacacacgcagctgggagggcacgaagcccccggcaaaggtggtggtgcccacccgcgtggggcagggctatgtatacgaggccgcccagccggagcaggacgagtacgacatcccgcgacacctgctggccccggggccacaggacatctatgatgtgcccccggttcgggggctgcttcccagccagtatggccaggaggtgtatgacacaccccccatggctgtcaagggtcccaatggccgagacccgttgctggaggtgtatgacgtgccccccagtgtggagaagggcctgccaccgtccaaccaccacgcagtctacgacgttcctccatcggtgagcaaggatgtgcccgatggcccactgctgcgtgaggagacctacgatgtgccccccgccttcgccaaggccaagccctttgacccggcccgcaccccactggtactggctgcgccccctccagactccccgccggccgaggacgtgtatgacgtgccgcccccggctcctgacctctacgacgtgccccctggcttgcggcggcctggcccgggcaccctgtacgatgtgccccgtgaacgggtgcttcctcctgaggtggctgatggtggcgtggtcgacagtggtgtgtatgcggtgcctcccccagctgaacgtgaagccccggcagagggcaagcgcctgtcggcctccagcaccggcagcacacgcagcagccagtctgcgtcctccttggaggtggcagggccgggccgggaacccctggagctggaagttgctgtggaggccctggcacggctgcagcagggtgtgagcgccaccgttgcccaccttctggacctggcaggcagcgccggtgcgactgggagctggcgtagcccctctgagccacaggagccgctggtgcaggacctgcaggctgctgtggccgctgtccagagtgccgtccacgagctgttggagtttgcccgcagcgcggtgggcaatgctgcccacacatctgaccgtgccctgcatgccaagcttagccggcagctgcagaagatggaggacgtgcaccagacgctggtggcacatggtcaggccctcgacgctggccggggaggctctggagccacccttgaggacctggaccggctggtggcctgctcgcgggctgtgcccgaggacgccaagcagctggcctccttcctgcacggcaatgcctcactgctcttcagacggaccaaggccactgccccggggcctgaggggggtggcaccctgcaccccaaccccactgacaagaccagcagcatccagtcacgacccctgccctcaccccctaagttcacctcccaggactcgccagatgggcagtacgagaacagcgaggggggctggatggaggactatgactacgtccacctacaggggaaggaggagtttgagaagacccagaaggagctgctggaaaagggcagcatcacgcggcagggcaagagccagctggagttgcagcagctgaagcagtttgaacgactggaacaggaggtgtcacggcccatagaccacgacctggccaactggacgccagcccaacccctggccccggggcgaacaggcggcctggggccctcggaccggcagctgctgctcttctacctggagcagtgtgaggccaacctgaccacactgaccaacgccgtggacgccttctttaccgccgtggccaccaaccagccgcccaagatctttgtggcgcacagcaagttcgtcatcctcagcgcccacaagctggtgttcatcggggacacactgtcacggcaggccaaggctgctgacgtgcgcagccaggtgacccactacagcaacctgctgtgcgacctcctgcgcggcatcgtggccaccaccaaggccgctgccttgcagtacccatcgccttccgcggcccaggacatggtggagagggtcaaggagctgggccacagcacccagcagttccgccgcgtcctaggccagctggcagccgcctgagggtggtgaccccaggagggaggcaggggaggggtgcggcggtcccagctccctggctcccatgtcaagagtcgctgtgccacaggcttagggacaggaccccagctctgcgtcggtcctggtgccctggatgcccaggaatctgtatatatttatggccgggcagggtgtggggccatgcctcctcaggagccgaagcccaggggccggccagtggccttccccagcatgcaccacgggcccgggttgggtcaccagacggggctggagtgtgagggtcctgcagcctgcaggacctcgtgccaccccgagggctgagcctggtcccacgagggtgccgtgtcccctgacagggccagtgcagtttggtgtgtcctccgccttaccaggagaagaacctgaagaactatttttcgtt

SEQ ID NO: 4344 - protein, 870 aa, Homosapiens; identical to SEQ ID NO: 4336

SEQ ID NO: 4345 - DNA, 537 bp, Homosapiens
atgaagatcatgctgaagctcacacggcaggaccagaacccaggtcagccccaccccgccctgccctgccactggaggtcaatggcgacaggagcctgggttcttgccaaactgcagacctcactccccacagtgagttccttcctgttttcacaaggatcggtctcactctcgggtaacagcgagattttcctagtgccccccaccccccactccaaccctgggcggacccttggcctcaggcaacatcacagggcagctgccgggggtgcctggcattcaagccttgctgagaacatgaaactgctgctctggggactcgcactggtgaccccaatgtggcagccgctctttcggctcttcaataatttagagaatgcatacaattcagcgggcagtttcatctctgggttcagaaacacaatgccctggggattgcttccagcgaagagtgaaattccacttgtcacagtgacagaggatgtgagcctgttcctggaaggggctctggtctctgggtgtttgcgaacatcctag

SEQ ID NO: 4346 - protein, 178 aa, Homosapiens
MKIMLKLTRQDQNPGQPHPALPCHWRSMATGAWVLAKLQTSLPTVSSFLFSQGSVSLSGNSEIFLVPPTPHSNPGRTLGLRQHHRAAAGGAWHSSLAENMKLLLWGLALVTPMWQPLFRLFNNLENAYNSAGSFISGFRNTMPWGLLPAKSEIPLVTVTEDVSLFLEGALVSGCLRTS

SEQ ID NO: 4347 - DNA, 1078 bp, Homosapiens
aatggccccaatctaggggattcccatttgcatcagaaaaactgttaatatagagatcagagtttttacctgctacatctttcatattttctttccttaggttaaaaagatcaagtggcatgagcagccttttggggaaaattggtgccaagaagcagaaaatgagcacccttgagaagtccaaactggactgggagagcttcaaggaggaagaggggattggtgaagaactggccatccataatcgagggaaagaggggtacattgaacggaaagccttccttgaccgagtggatcacaggcagtttgaaattgagcgagatctcaggctgagcaaaatgaaaccttgatgttacgggctaaatcaagagcagcttaatcctgtttacaatgtgagctttttgtgcgtctgtgaaatgttttacagtgtttctcatcatctgtttcccagcaaggtcttttttttttctacattgaagttctgtctatgtatcttaatcacaaatggtttcattcactttacttttaaaaatttgtccttaaatgaataaataaaataaaagttggtcctgtgagaggataatgaagatgacgacctcgctcaccttccctttattctgccgcaaagtcccacccagttcaagacagcacattccaggtctgtccaggctggcagaggtcttgccaggcatggtgaagatagctgaccaacctgggtgtgaattttccggggccaagaggctctttctgcagccagccttgccccgaagacctagaggaggcggctcactagagtgactggaatgccaggccccttcgcagcttgttctcatttccactcgggcttctcttctgatctctctttctcctgaatggattcctactgatggcatgtaaggctgaaaataaggatatattattgctgaattagctgttttttcccttcagcctttttcctcttcccaaagaaaagttaaattcagatatgctcccacttcaataattcattaatttttagtttgtcaaagaatattctgaaggattttcttttttatactcataagaaaatgtaaatttc

SEQ ID NO: 4348 - protein, 76 aa, Homosapiens
MSSLLGKIGAKKQKMSTLEKSKLDWESFKEEEGIGEELAIHNRGKEGYIERKAFLDRVDHRQFEIERDLRLSKMKP

SEQ ID NO: 4349 - DNA, 1602 bp, Homosapiens
gtgccaagtgctgttttagccctttacgtgtaagatacaccacagcctgtgagtaagcatttgctttgtagattaggaaaccaaggaacatgcagtaaataactggcctagagtcacacagttaagctggaagttggaccttggcatgtgactccaaagccctgcctgaagcgctgctcctcccctccttgcaagcagagacctgccacacagagcccacagaggtctgaagaaggcaggatttcctgttcgtagctcaggagagcagacagtggtgttaagcaggaaaagcacattagaattccagtttacttacagtgctctccacaccaggaaggaaatgccccaaatatgaacatggcttccactaagataaatggccccaatctaggggattcccatttgcatcagaaaaactgttaatatagagatcagagtttttacctgctacatctttcatattttctttccttaggttaaaaagatcaagtggcatgagcagccttttggggaaaattggtgccaagaagcagaaaatgagcacccttgagaagtccaaactggactgggagagcttcaaggaggaagaggggattggtgaagaactggccatccataatcgagggaaagagggatggattaaaggagcccagcccctaggccagtgaagggactggagctctgttcttcaccttggctgagcatgagaatcctctggtgacattttccaaagttcaggtgaccacctctgtacagagctgctgaatcaagagtctagaacaggtacattgaacggaaagccttccttgaccgagtggatcacaggcagtttgaaattgagcgagatctcaggctgagcaaaatgaaaccttgatgttacgggctaaatcaagagcagcttaatcctgtttacaatgtgagctttttgtgcgtctgtgaaatgttttacagtgtttctcatcatctgtttcccagcaaggtcttttttttttctacattgaagttctgtctatgtatcttaatcacaaatggtttcattcactttacttttaaaaatttgtccttaaatgaataaataaaataaaagttggtcctgtgagaggataatgaagatgacgacctcgctcaccttccctttattctgccgcaaagtcccacccagttcaagacagcacattccaggtctgtccaggctggcagaggtcttgccaggcatggtgaagatagctgaccaacctgggtgtgaattttccggggccaagaggctctttctgcagccagccttgccccgaagacctagaggaggcggctcactagagtgactggaatgccaggccccttcgcagcttgttctcatttccactcgggcttctcttctgatctctctttctcctgaatggattcctactgatggcatgtaaggctgaaaataaggatatattattgctgaattagctgttttttcccttcagcctttttcctcttcccaaagaaaagttaaattcagatatgctcccacttcaataattcattaatttttagtttgtcaaagaatattctgaaggattttcttttttatactcataagaaaatgtaaatttc

SEQ ID NO: 4350 - protein, 57 aa, Homosapiens
MSSLLGKIGAKKQKMSTLEKSKLDWESFKEEEGIGEELAIHNRGKEGWIKGAQPLGQ

SEQ ID NO: 4351 - DNA, 1137 bp, Homosapiens
tcttaagctcagcatgtactggggtgtgacccaaacagggaagttgacatcctctctactaaagttaatagaatgagaatgttcagggtcattgttcagtcccagcagtctggtgttcagtgtggacgttggcctgttggctcacaccaggcagagggggttaaaaagatcaagtggcatgagcagccttttggggaaaattggtgccaagaagcagaaaatgagcacccttgagaagtccaaactggactgggagagcttcaaggaggaagaggggattggtgaagaactggccatccataatcgagggaaagaggggtacattgaacggaaagccttccttgaccgagtggatcacaggcagtttgaaattgagcgagatctcaggctgagcaaaatgaaaccttgatgttacgggctaaatcaagagcagcttaatcctgtttacaatgtgagctttttgtgcgtctgtgaaatgttttacagtgtttctcatcatctgtttcccagcaaggtcttttttttttctacattgaagttctgtctatgtatcttaatcacaaatggtttcattcactttacttttaaaaatttgtccttaaatgaataaataaaataaaagttggtcctgtgagaggataatgaagatgacgacctcgctcaccttccctttattctgccgcaaagtcccacccagttcaagacagcacattccaggtctgtccaggctggcagaggtcttgccaggcatggtgaagatagctgaccaacctgggtgtgaattttccggggccaagaggctctttctgcagccagccttgccccgaagacctagaggaggcggctcactagagtgactggaatgccaggccccttcgcagcttgttctcatttccactcgggcttctcttctgatctctctttctcctgaatggattcctactgatggcatgtaaggctgaaaataaggatatattattgctgaattagctgttttttcccttcagcctttttcctcttcccaaagaaaagttaaattcagatatgctcccacttcaataattcattaatttttagtttgtcaaagaatattctgaaggattttcttttttatactcataagaaaatgtaaatttc

SEQ ID NO: 4352 - protein, 76 aa, Homosapiens; identical to SEQ ID NO: 4348

SEQ ID NO: 4353 - DNA, 1375 bp, Homosapiens
ggtgctcagactttcatacattaagtctttttactatttcaaagatttctttgtcattctttggttgttacatttttctatagaaaaacaaaatagcatttttttttaaagaccatgttggatttgtcaaacctgactccagtgccagagtaaagagcgttgtactaacttaacgcttgtgtctgaatgaagttggccaaatgcttacatatgtttcctggtggtgattctttcagtattctcagttcacatgccactgggtcatcagaagacaagtatctggatttcagagccaacagtttgcttttatttaagctgcaagaccctccattgccataagatctgccactgccataataacaaaacctcagctggaacttctgctgcagccattgaggttaaaaagatcaagtggcatgagcagccttttggggaaaattggtgccaagaagcagaaaatgagcacccttgagaagtccaaactggactgggagagcttcaaggaggaagaggggattggtgaagaactggccatccataatcgagggaaagaggggtacattgaacggaaagccttccttgaccgagtggatcacaggcagtttgaaattgagcgagatctcaggctgagcaaaatgaaaccttgatgttacgggctaaatcaagagcagcttaatcctgtttacaatgtgagctttttgtgcgtctgtgaaatgttttacagtgtttctcatcatctgtttcccagcaaggtcttttttttttctacattgaagttctgtctatgtatcttaatcacaaatggtttcattcactttacttttaaaaatttgtccttaaatgaataaataaaataaaagttggtcctgtgagaggataatgaagatgacgacctcgctcaccttccctttattctgccgcaaagtcccacccagttcaagacagcacattccaggtctgtccaggctggcagaggtcttgccaggcatggtgaagatagctgaccaacctgggtgtgaattttccggggccaagaggctctttctgcagccagccttgccccgaagacctagaggaggcggctcactagagtgactggaatgccaggccccttcgcagcttgttctcatttccactcgggcttctcttctgatctctctttctcctgaatggattcctactgatggcatgtaaggctgaaaataaggatatattattgctgaattagctgttttttcccttcagcctttttcctcttcccaaagaaaagttaaattcagatatgctcccacttcaataattcattaatttttagtttgtcaaagaatattctgaaggattttcttttttatactcataagaaaatgtaaatttc

SEQ ID NO: 4354 - protein, 76 aa, Homosapiens; identical to SEQ ID NO: 4348

SEQ ID NO: 4355 - DNA, 1058 bp, Homosapiens
catcaatttggtttggtatccaagccctgcctctggaatcctgtcctgcctactacttcatagccactatccaagataaggttaaaaagatcaagtggcatgagcagccttttggggaaaattggtgccaagaagcagaaaatgagcacccttgagaagtccaaactggactgggagagcttcaaggaggaagaggggattggtgaagaactggccatccataatcgagggaaagaggggtacattgaacggaaagccttccttgaccgagtggatcacaggcagtttgaaattgagcgagatctcaggctgagcaaaatgaaaccttgatgttacgggctaaatcaagagcagcttaatcctgtttacaatgtgagctttttgtgcgtctgtgaaatgttttacagtgtttctcatcatctgtttcccagcaaggtcttttttttttctacattgaagttctgtctatgtatcttaatcacaaatggtttcattcactttacttttaaaaatttgtccttaaatgaataaataaaataaaagttggtcctgtgagaggataatgaagatgacgacctcgctcaccttccctttattctgccgcaaagtcccacccagttcaagacagcacattccaggtctgtccaggctggcagaggtcttgccaggcatggtgaagatagctgaccaacctgggtgtgaattttccggggccaagaggctctttctgcagccagccttgccccgaagacctagaggaggcggctcactagagtgactggaatgccaggccccttcgcagcttgttctcatttccactcgggcttctcttctgatctctctttctcctgaatggattcctactgatggcatgtaaggctgaaaataaggatatattattgctgaattagctgttttttcccttcagcctttttcctcttcccaaagaaaagttaaattcagatatgctcccacttcaataattcattaatttttagtttgtcaaagaatattctgaaggattttcttttttatactcataagaaaatgtaaatttc

SEQ ID NO: 4356 - protein, 76 aa, Homosapiens; identical to SEQ ID NO: 4348

SEQ ID NO: 4357 - DNA, 1805 bp, Homosapiens
ggccggaagtgtcgtagggcaaccacgtagtactctctgcgcatgtgcaaagcgctgtcgggggccgccctagctgccgtcgccgccgccggggctctatggtctctccctagagctttgccgttggaggcggctgctgcggtcttgtgagtttgaccagcgtcgagcggcagcaacatggaggaattcgactccgaagacttctctacgtcggaggaggacgaggactacgtgccgtcgggtggagagtatagtgaagatgatgtaaatgaattagtgaaggaagatgaagtggatggtgaagagcagacacagaaaacccaagggaaaaaaagaaaggcccagagcattccagccaggaagagaagacaaggtggcctctcattagaagaagaggaagaggaggatgccaattcagaatctgagggaagcagtagtgaggaggaagatgacgctgcagagcaggaaaaaggcattggatcagaggatgccaggaaaaagaaggaggacgaactctgggccagcttcctcaatgatgtgggaccaaaatcaaaagtgcccccaagtacacaagttaagaaaggagaggagactgaagagacaagttcaagtaaattgttggtaaaagcagaagagctagagaaacctaaagaaacagaaaaagttaaaatcaccaaggtgtttgattttgctggtgaagaagtaagggtaactaaggaagtggatgctacatctaaagaggccaaatccttcttcaagcagaatgagaaagaaaaaccacaggctaatgttccttcagctctgccatcactccctgccgggtcagggttaaaaagatcaagtggcatgagcagccttttggggaaaattggtgccaagaagcagaaaatgagcacccttgagaagtccaaactggactgggagagcttcaaggaggaagaggggattggtgaagaactggccatccataatcgagggaaagaggggtacattgaacggaaagccttccttgaccgagtggatcacaggcagtttgaaattgagcgagatctcaggctgagcaaaatgaaaccttgatgttacgggctaaatcaagagcagcttaatcctgtttacaatgtgagctttttgtgcgtctgtgaaatgttttacagtgtttctcatcatctgtttcccagcaaggtcttttttttttctacattgaagttctgtctatgtatcttaatcacaaatggtttcattcactttacttttaaaaatttgtccttaaatgaataaataaaataaaagttggtcctgtgagaggataatgaagatgacgacctcgctcaccttccctttattctgccgcaaagtcccacccagttcaagacagcacattccaggtctgtccaggctggcagaggtcttgccaggcatggtgaagatagctgaccaacctgggtgtgaattttccggggccaagaggctctttctgcagccagccttgccccgaagacctagaggaggcggctcactagagtgactggaatgccaggccccttcgcagcttgttctcatttccactcgggcttctcttctgatctctctttctcctgaatggattcctactgatggcatgtaaggctgaaaataaggatatattattgctgaattagctgttttttcccttcagcctttttcctcttcccaaagaaaagttaaattcagatatgctcccacttcaataattcattaatttttagtttgtcaaagaatattctgaaggattttcttttttatactcataagaaaatgtaaatttc

SEQ ID NO: 4358 - protein, 299 aa, Homosapiens; identical to SEQ ID NO: 620

SEQ ID NO: 4359 - DNA, 591 bp, Homosapiens
aatggccccaatctaggggattcccatttgcatcagaaaaactgttaatatagagatcagagtttttacctgctacatctttcatattttctttccttaggttaaaaagatcaagtggcatgagcagccttttggggaaaattggtgccaagaagcagaaaatgagcacccttgagaagtccaaactggactgggagagcttcaaggaggaagaggggattggtgaagaactggccatccataatcgagggaaagaggggtacattgaacggaaagccttccttgaccgagtggatcacaggcagtttgaaattgagcgagatctcaggctgagcaaaatgaaaccttgatgttacgggctaaatcaagagcagcttaatcctgtttacaatgtgagctttttgtgcgtctgtgaaatgttttacagtgtttctcatcatctgtttcccagcaaggtcttttttttttctacattgaagttctgtctatgtatcttaatcacaaatggtttcattcactttacttttaaaaatttgtccttaaatgaataaataaaataaaagttggtcctgtgagaggataatgaagatg

SEQ ID NO: 4360 - protein, 76 aa, Homosapiens; identical to SEQ ID NO: 4348

SEQ ID NO: 4361 - DNA, 1115 bp, Homosapiens
gtgccaagtgctgttttagccctttacgtgtaagatacaccacagcctgtgagtaagcatttgctttgtagattaggaaaccaaggaacatgcagtaaataactggcctagagtcacacagttaagctggaagttggaccttggcatgtgactccaaagccctgcctgaagcgctgctcctcccctccttgcaagcagagacctgccacacagagcccacagaggtctgaagaaggcaggatttcctgttcgtagctcaggagagcagacagtggtgttaagcaggaaaagcacattagaattccagtttacttacagtgctctccacaccaggaaggaaatgccccaaatatgaacatggcttccactaagataaatggccccaatctaggggattcccatttgcatcagaaaaactgttaatatagagatcagagtttttacctgctacatctttcatattttctttccttaggttaaaaagatcaagtggcatgagcagccttttggggaaaattggtgccaagaagcagaaaatgagcacccttgagaagtccaaactggactgggagagcttcaaggaggaagaggggattggtgaagaactggccatccataatcgagggaaagagggatggattaaaggagcccagcccctaggccagtgaagggactggagctctgttcttcaccttggctgagcatgagaatcctctggtgacattttccaaagttcaggtgaccacctctgtacagagctgctgaatcaagagtctagaacaggtacattgaacggaaagccttccttgaccgagtggatcacaggcagtttgaaattgagcgagatctcaggctgagcaaaatgaaaccttgatgttacgggctaaatcaagagcagcttaatcctgtttacaatgtgagctttttgtgcgtctgtgaaatgttttacagtgtttctcatcatctgtttcccagcaaggtcttttttttttctacattgaagttctgtctatgtatcttaatcacaaatggtttcattcactttacttttaaaaatttgtccttaaatgaataaataaaataaaagttggtcctgtgagaggataatgaagatg

SEQ ID NO: 4362 - protein, 57 aa, Homosapiens; identical to SEQ ID NO: 4350

SEQ ID NO: 4363 - DNA, 593 bp, Homosapiens
actaaagttaatagaatgagaatgttcagggtcattgttcagtcccagcagtctggtgttcagtgtggacgttggcctgttggctcacaccaggcagagggggttaaaaagatcaagtggcatgagcagccttttggggaaaattggtgccaagaagcagaaaatgagcacccttgagaagtccaaactggactgggagagcttcaaggaggaagaggggattggtgaagaactggccatccataatcgagggaaagaggggtacattgaacggaaagccttccttgaccgagtggatcacaggcagtttgaaattgagcgagatctcaggctgagcaaaatgaaaccttgatgttacgggctaaatcaagagcagcttaatcctgtttacaatgtgagctttttgtgcgtctgtgaaatgttttacagtgtttctcatcatctgtttcccagcaaggtcttttttttttctacattgaagttctgtctatgtatcttaatcacaaatggtttcattcactttacttttaaaaatttgtccttaaatgaataaataaaataaaagttggtcctgtgagaggataatgaagatg

SEQ ID NO: 4364 - protein, 76 aa, Homosapiens; identical to SEQ ID NO: 4348

SEQ ID NO: 4365 - DNA, 888 bp, Homosapiens
ggtgctcagactttcatacattaagtctttttactatttcaaagatttctttgtcattctttggttgttacatttttctatagaaaaacaaaatagcatttttttttaaagaccatgttggatttgtcaaacctgactccagtgccagagtaaagagcgttgtactaacttaacgcttgtgtctgaatgaagttggccaaatgcttacatatgtttcctggtggtgattctttcagtattctcagttcacatgccactgggtcatcagaagacaagtatctggatttcagagccaacagtttgcttttatttaagctgcaagaccctccattgccataagatctgccactgccataataacaaaacctcagctggaacttctgctgcagccattgaggttaaaaagatcaagtggcatgagcagccttttggggaaaattggtgccaagaagcagaaaatgagcacccttgagaagtccaaactggactgggagagcttcaaggaggaagaggggattggtgaagaactggccatccataatcgagggaaagaggggtacattgaacggaaagccttccttgaccgagtggatcacaggcagtttgaaattgagcgagatctcaggctgagcaaaatgaaaccttgatgttacgggctaaatcaagagcagcttaatcctgtttacaatgtgagctttttgtgcgtctgtgaaatgttttacagtgtttctcatcatctgtttcccagcaaggtcttttttttttctacattgaagttctgtctatgtatcttaatcacaaatggtttcattcactttacttttaaaaatttgtccttaaatgaataaataaaataaaagttggtcctgtgagaggataatgaagatg

SEQ ID NO: 4366 - protein, 76 aa, Homosapiens; identical to SEQ ID NO: 4348

SEQ ID NO: 4367 - DNA, 571 bp, Homosapiens
catcaatttggtttggtatccaagccctgcctctggaatcctgtcctgcctactacttcatagccactatccaagataaggttaaaaagatcaagtggcatgagcagccttttggggaaaattggtgccaagaagcagaaaatgagcacccttgagaagtccaaactggactgggagagcttcaaggaggaagaggggattggtgaagaactggccatccataatcgagggaaagaggggtacattgaacggaaagccttccttgaccgagtggatcacaggcagtttgaaattgagcgagatctcaggctgagcaaaatgaaaccttgatgttacgggctaaatcaagagcagcttaatcctgtttacaatgtgagctttttgtgcgtctgtgaaatgttttacagtgtttctcatcatctgtttcccagcaaggtcttttttttttctacattgaagttctgtctatgtatcttaatcacaaatggtttcattcactttacttttaaaaatttgtccttaaatgaataaataaaataaaagttggtcctgtgagaggataatgaagatg

SEQ ID NO: 4368 - protein, 76 aa, Homosapiens; identical to SEQ ID NO: 4348

SEQ ID NO: 4369 - DNA, 474 bp, Homosapiens
agactgaagagacaagttcaagtaaattgttggtaaaagcagaagagctagagaaacctaaagaaacagaaaaagttaaaatcaccaaggtgtttgattttgctggtgaagaactggccatccataatcgagggaaagaggggtacattgaacggaaagccttccttgaccgagtggatcacaggcagtttgaaattgagcgagatctcaggctgagcaaaatgaaaccttgatgttacgggctaaatcaagagcagcttaatcctgtttacaatgtgagctttttgtgcgtctgtgaaatgttttacagtgtttctcatcatctgtttcccagcaaggtcttttttttttctacattgaagttctgtctatgtatcttaatcacaaatggtttcattcactttacttttaaaaatttgtccttaaatgaataaataaaataaaagttggtcctgtgagaggataatgaagatg

SEQ ID NO: 4370 - protein, 44 aa, Homosapiens
MFYSVSHHLFPSKVFFFSTLKFCLCILITNGFIHFTFKNLSLNE

SEQ ID NO: 4371 - DNA, 1318 bp, Homosapiens
ggccggaagtgtcgtagggcaaccacgtagtactctctgcgcatgtgcaaagcgctgtcgggggccgccctagctgccgtcgccgccgccggggctctatggtctctccctagagctttgccgttggaggcggctgctgcggtcttgtgagtttgaccagcgtcgagcggcagcaacatggaggaattcgactccgaagacttctctacgtcggaggaggacgaggactacgtgccgtcgggtggagagtatagtgaagatgatgtaaatgaattagtgaaggaagatgaagtggatggtgaagagcagacacagaaaacccaagggaaaaaaagaaaggcccagagcattccagccaggaagagaagacaaggtggcctctcattagaagaagaggaagaggaggatgccaattcagaatctgagggaagcagtagtgaggaggaagatgacgctgcagagcaggaaaaaggcattggatcagaggatgccaggaaaaagaaggaggacgaactctgggccagcttcctcaatgatgtgggaccaaaatcaaaagtgcccccaagtacacaagttaagaaaggagaggagactgaagagacaagttcaagtaaattgttggtaaaagcagaagagctagagaaacctaaagaaacagaaaaagttaaaatcaccaaggtgtttgattttgctggtgaagaagtaagggtaactaaggaagtggatgctacatctaaagaggccaaatccttcttcaagcagaatgagaaagaaaaaccacaggctaatgttccttcagctctgccatcactccctgccgggtcagggttaaaaagatcaagtggcatgagcagccttttggggaaaattggtgccaagaagcagaaaatgagcacccttgagaagtccaaactggactgggagagcttcaaggaggaagaggggattggtgaagaactggccatccataatcgagggaaagaggggtacattgaacggaaagccttccttgaccgagtggatcacaggcagtttgaaattgagcgagatctcaggctgagcaaaatgaaaccttgatgttacgggctaaatcaagagcagcttaatcctgtttacaatgtgagctttttgtgcgtctgtgaaatgttttacagtgtttctcatcatctgtttcccagcaaggtcttttttttttctacattgaagttctgtctatgtatcttaatcacaaatggtttcattcactttacttttaaaaatttgtccttaaatgaataaataaaataaaagttggtcctgtgagaggataatgaagatg

SEQ ID NO: 4372 - protein, 299 aa, Homosapiens; identical to SEQ ID NO: 620

SEQ ID NO: 4373 - DNA, 427 bp, Homosapiens
aaaagtccaaggactttccatgctagaagactcccatatgccatcaaagaagctcaaattaacaatcagacaattccaaagagcaggccattctacaggtaaggggactgttctaaattaaaggagaccaacgtttcttggcttgaaatttctcaaaatcaaaagtttgtggggaaagaaaccgccaaaatttaaaatacactttgctgccaaagatgacttagcctcgaaaaaagaacaagcaacttctgagtcccagctccactaatctttcctagcagcagcaatttttttttttttttttttaagacaaagtctcactctgtagcccaggctggagtgcaatggtgtgatctcgactcactgcaacctccacctcccaggagaatggcatgaacctgggaagtggagcttgccgtgagccaag

SEQ ID NO: 4374 - protein, 33 aa, Homosapiens
MLEDSHMPSKKLKLTIRQFQRAGHSTGKGTVLN

SEQ ID NO: 4375 - DNA, 1320 bp, Homosapiens
ggccggaagtgtcgtagggcaaccacgtagtactctctgcgcatgtgcaaagcgctgtcgggggccgccctagctgccgtcgccgccgccggggctctatggtctctccctagagctttgccgttggaggcggctgctgcggtcttgtgagtttgaccagcgtcgagcggcagcaacatggaggaattcgactccgaagacttctctacgtcggaggaggacgaggactacgtgccgtcgggtggagagtatagtgaagatgatgtaaatgaattagtgaaggaagatgaagtggatggtgaagagcagacacagaaaacccaagggaaaaaaagaaaggcccagagcattccagccaggaagagaagacaaggtggcctctcattagaagaagaggaagaggaggatgccaattcagaatctgagggaagcagtagtgaggaggaagatgacgctgcagagcaggaaaaaggcattggatcagaggatgccaggaaaaagaaggaggacgaactctgggccagcttcctcaatgatgtgggaccaaaatcaaaagtgcccccaagtacacaagttaagaaaggagaggagactgaagagacaagttcaagtaaattgttggtaaaagcagaagagctagagaaacctaaagaaacagaaaaagttaaaatcaccaaggtgtttgattttgctggtgaagaagtaagggtaactaaggaagtggatgctacatctaaagaggccaaatccttcttcaagcagaatgagaaagaaaaaccacaggctaatgttccttcagctctgccatcactccctgccgggtcaggatgtgtcatttaaaaaactgttatgacctgctgaattgatttcacaatcaactgcaacctgaatttgacaaaatactgctctagacaacgtatggaattagccttcagcaggtgattaagagttgccaggaagaagaaatttgatgcctagagattgatctgctttttgtttttaagttctagttctggttcgatttcagaaccagtctgcaggcaactctgcattgtctccttagagaactggacaattccactgatctggatcctttggcagcaagctgacattttattgaggctggtcagcactcctggccagagtcttgaaattgtgggtgtgtttttgctgcccattgttgagttattcatgaacagatatgaaaaccatatatatccgaattttgttaccactagatgtgatgagtttttctttttgattatttggggattcttagttctctgtcaaactcttcagattaaaacccttcttatagct

SEQ ID NO: 4376 - protein, 220 aa, Homosapiens
MEEFDSEDFSTSEEDEDYVPSGGEYSEDDVNELVKEDEVDGEEQTQKTQGKKRKAQSIPARKRRQGGLSLEEEEEEDANSESEGSSSEEEDDAAEQEKGIGSEDARKKKEDELWASFLNDVGPKSKVPPSTQVKKGEETEETSSSKLLVKAEELEKPKETEKVKITKVFDFAGEEVRVTKEVDATSKEAKSFFKQNEKEKPQANVPSALPSLPAGSGCVI

SEQ ID NO: 4377 - DNA, 445 bp, Homosapiens
gagtatttgagtctcactccctgatgtacttggcacgttggagaagctttcatgctgggattacaggtatgggccattgctcctggccctgggtcttacattctgaagcatctgtcactatgtaattagaatattttctaaaatcttttgaaaggcttggactattgtaatcatttcctaagtttacataaagtctgtagtcactcttcctctctccactctacgtgccactgctggggtaatttggcagagatttagcttagatagtgtcacatgctcaaaaattttatctttgttgtctattagtaagttctagtttattgaactgctactgtcgattgctaactctcaaaaaaatccttcagttcactgtcagtatttccttttatgtttaatatgtttttactctttagcgaggttttatctgtggtgtgatcttatatga

SEQ ID NO: 4378 - protein, 33 aa, Homosapiens
MYLARWRSFHAGITGMGHCSWPWVLHSEASVTM

SEQ ID NO: 4379 - DNA, 1235 bp, Homosapiens
ggccggaagtgtcgtagggcaaccacgtagtactctctgcgcatgtgcaaagcgctgtcgggggccgccctagctgccgtcgccgccgccggggctctatggtctctccctagagctttgccgttggaggcggctgctgcggtcttgtgagtttgaccagcgtcgagcggcagcaacatggaggaattcgactccgaagacttctctacgtcggaggaggacgaggactacgtgccgtcgggtggagagtatagtgaagatgatgtaaatgaattagtgaaggaagatgaagtggatggtgaagagcagacacagaaaacccaagggaaaaaaagaaaggcccagagcattccagccaggaagagaagacaaggtggcctctcattagaagaagaggaagaggaggatgccaattcagaatctgagggaagcagtagtgaggaggaagatgacgctgcagagcaggaaaaaggcattggatcagaggatgccaggaaaaagaaggaggacgaactctgggccagcttcctcaatgatgtgggaccaaaatcaaaagtgcccccaagtacacaagttaagaaaggagaggagactgaagagacaagttcaagtaaattgttggtaaaagcagaagagctagagaaacctaaagaaacagaaaaagttaaaatcaccaaggtgtttgattttgctggtgaagaagtaagggtaactaaggaagtggatgctacatctaaagaggccaaatccttcttcaagcagaatgagaaagaaaaaccacaggctaatgttccttcagctctgccatcactccctgccgggtcagggtgagtatttgagtctcactccctgatgtacttggcacgttggagaagctttcagtgcaaatacctactttcgctgcagatcagactccttgcctgagagagagaattatgatgctgctttgcctttgctgcaatatttaccagaatggaagatgcaaaggaaaattagccataactttctcaggaggattgcttgaacccaggagtttgtgaccagcctgggcaatacagtaagaccctgtctcttaaaaaaaaaaaaattagctgggcatggtggcttgcacctctgtcctagctactgtggaggctgaggcaggaggatcccttgagcccagaaggttgaggctgcagtgagccgtgattgtgccactgcactccagcctgggtgacagagagatcctgtctctt

SEQ ID NO: 4380 - protein, 217 aa, Homosapiens
MEEFDSEDFSTSEEDEDYVPSGGEYSEDDVNELVKEDEVDGEEQTQKTQGKKRKAQSIPARKRRQGGLSLEEEEEEDANSESEGSSSEEEDDAAEQEKGIGSEDARKKKEDELWASFLNDVGPKSKVPPSTQVKKGEETEETSSSKLLVKAEELEKPKETEKVKITKVFDFAGEEVRVTKEVDATSKEAKSFFKQNEKEKPQANVPSALPSLPAGSG

SEQ ID NO: 4381 - DNA, 2557 bp, Homosapiens
agctgaagtttgaactgggagaagcgccgccttctagtcgcagctcctgtgctgtaaacaaagagtcctttccgcagtctgtttactgacacttttttttctgctttttgtgggtggttttgctttctaaaatggcccccaagcgtagtgcttaagctctgcccagtgttcctaagcgaaagaagaccgtgatgtgccttacggagaaagtccgcgtgttggataagctccaatcaggcatgagttacagtgctgttggccatgagctcaatgttaacgagtcgacaatccggtacatcaagaaaaaggaaaaggaaattcaccgatctgtccgtgaggccgctccggatagtgctgaagtgacctccatcgtgcgtgatgaagctatgacaaagatggaaaagatggaaaagcggctaaatttgtggattcatgagatgtcaatcgattaaaaaaaacatagtggacagcattgtggtgaggctgaaagccaaagatatctgtggtcacgttacccagagtcaaagaaatgctaagcccttctcggcgagtgctggccggctcgcgcgtttcaaaaggcgatacggggtgaaaaatgttaaacttgcaggtgaggcgagctctgcagatcaggaggctgcggaagaattttaaaaatacttgctaagtgttatacaggaaaagggttatgtgaaagagcaggttttcaatgcggatgagactggcttattttacaaggatgttggcaaacgaacctatataatgcaaacggcctccaaagcccctggctttaaatcatgccaggatcatgcacccttgttattgtgcgccaatgccaagagcgactaaagtgcaaactcctaatggtgtaaagaacccaaaatccacaagcacttaacgggaaatacgtgaaccatctgccagtctattggaggtggaacaaaaaagtgtggatgatgtctgattggttccacaactgcttcatcccagaagctgaacactgtctccagggcagaaaccttgccttcaagggttttttgttttgttttgttttgttttttgtttgtttgggtttgttttgttttggtttggttttgaaacggagtctcgctctgtcgcccaggctggagtgcagtggcgcaatctcggctcactgcaagctccgcctcccgggttcacgtcattctcctgcctcagcctcccgagtagctgggactacaggcgtccactaccacgcctggataattttttgtattttcagtagagacggggtttcaccgtgttagccaggatggtcttgatctcctgacctcatgatccgcctgcctcggcctcccaaagtgttgggattacaggcgtgagccaccgcgccgggcaccttcaaggttttgttaattttggataatgctacaatccattgctgcaaagaactcgaaaatgcacacgccaacataggagttctttttatgcccccaaacactaagtctctcatccaacccctcaatcggggcataataaaagcattcaaggcacactacacaagggagctttatatgaaggcctgtgaggctctcaggaccaacaaggaaaccaccatgctggactattggaagtcggtcactacatgcaacgttattgattatgtcagtacagcctgggagagcattggtcaggctactaccaataactgttgggaaaatgtttggccagactgcgtggagaattttgaagggtttgaaggtgttacagaaaatataaagaacactgtcagagacataatgcatatggcacagcaggtaagtggagagggctttgatgacgtgaaggaaggagatgtggagtacattttggcagagaaggcagtggaaccaaccaacgaagacctggatgagatggcaaaagaaggcattggagttgatggccatgaaagtcggcccaagacttccagaattgtccctctcacagcgccaaaatatcagaatggagttctgccttggaaaaaatttttagcgacatggaagagtgtgaccctacgcttgatcgaagcctcaaatttaaatggctggcctccactgcgtttgccccttataccgagatgcttaaagatttcaggcagaaaagccaggcaggcaaggctaatgcaatttctcaagccagtttgggagggaagattgcccactccttcaacaagtgtcaagagccagactcctaaggtagaaatgccagaggttgacctgccaccctcttcctcttctgcagaataaatttcactcacccctcccctggtttctgtggggcaagccaaggtcgagaggtttaaccacattgtgcagctccatcaaccgtaagattttagttgatatttttataaaacttaggatgctccatctttgaactttttccctttatttgtattgctgtactgtagggtatacagtatgtgtgcaaagtagtgtatgtgtttactgtgggaactgtacagtatgttatactgttgactgtatatgggaactatatgtgtgtactctgtgtgtgccaatgaaaaggttgtacaggc

SEQ ID NO: 4382 - protein, 265 aa, Homosapiens
MPPNTKSLIQPLNRGIIKAFKAHYTRELYMKACEALRTNKETTMLDYWKSVTTCNVIDYVSTAWESIGQATTNNCWENVWPDCVENFEGFEGVTENIKNTVRDIMHMAQQVSGEGFDDVKEGDVEYILAEKAVEPTNEDLDEMAKEGIGVDGHESRPKTSRIVPLTAPKYQNGVLPWKKFLATWKSVTLRLIEASNLNGWPPLRLPLIPRCLKISGRKARQARLMQFLKPVWEGRLPTPSTSVKSQTPKVEMPEVDLPPSSSSAE

SEQ ID NO: 4383 - DNA, 4318 bp, Homosapiens
aaaagaatacattatggagtgtagtgttttcttagttcttcaaagggaagcaacttggatgaacaggaacatgaaggacaacacatctcagccttttcttcattttgaagctcctagaattgaagacttatgtggactcctattgttctcaaccaaaacaagtcttttggctttcttttttgtagatatttgatttaagcagttttcatgtgtacctttacccaagccaagtcaacagtgtctctggggtggcatcctttgcactgaaatttacagtattctgtgagatgtcgcatattttgaagaaaccgtggaagatactggtttatttcaaatgagcagagtatgttgtattaaaatcttatctaatcttgattaaaatttggcaaactcttttctttgctacatcttagtgacaataaatgccaaataggttttggttgagtatagttttgaaaacaaatttggtgaaataaagcaggaaaaaaaatttaagtataactcaagtagtggctttggttccactgtttataaataaaaagtagataacaatgaataatgtgacattttctggacaactgtcttgacttctgattaagatattttaagagatgtgaatttgttattttgtatgttttatcaaaataagctagctaatttagactttttagattttctgtaccacctttccctatcacttttaattctcttaattttatttcatttaattggaaacatacataccctattaaatggcttgagttggaaattttaagccagatttgtttggacattgaggcacacataagatactttaggcattctgtcatagtttttcttagtgactttggtatactaatgacccttgagaaactatagaagtgcatctgaaactagagttagtggttattgattttttagcttaatgtgtttacctagtggtaactcttcagcccacttttacagtattgggtatcaactcccagaaagtgcctaaagtttaatgttcagatatgtacccactctcccctttacatttttattcaaaagaatttatatctttaaagagatttaaatatcaagagtttttttaaaacttaattttagctatttaaatttttattctactgcctaactttctttttcattaaaaggcctgaaaactgtgactctttgagagggaaagaatcgcagaaattaagtatttaatgtgatcctttccacctaaactgttttgtatggaatacaatcagtgtggtggtagtggtggtggttatctgcaaaatagtttctggtgattaaatctgacttttttttttttttttcttttaaatgagacggagcctcactgtgttgcccaggctggagtgcagtggtgcaatctcagctcactccaacctctgccacccgggttcaagcgattctcctgcctcagtttcctgatgctgggattacaggcgtgagccaccgcgcctggccataaatctgacatctttaaaggaaagttttcattgtgagattaaggcttaacagcccatgaggtcatatacacatgaacgtatctattccatttaaagcaatacacactctggcttctgattaaaaatagccaggaggagagtctctgaatctactgtgattctggagtctgcccaatttggaaaaaaaaaaaaaagaaaaaagtcaggaggaccaatttgccagggaaactcatagaaaagaattacaaagagatcacaaaaactggacatattcttttgactaattagaccacttatggctgggcgcagtggctcacacctataatcccagcactttgggaggtcgatgtgggaggattgcttgagcccaagagttcaagactggcctgggcaacatagtgagaccttgtctctactacaaaataaaaaaaaattagctgggcgtggcctcagctacccaagaggctaaagtgggaggatcacttgtgcctgggaggttcaggctgctgtgagccgagaccacgccactgaactccagcttaggccacagggcaagaccctgtcttaaaataatattactaattttggtaattaacttatcaaaactatagtgacatatacacgggcagaaacttataagtagagttgtaatgcagccaaatattcttacaaattccctaacaagaagctcaaatctttctcacaggcaaattgtaaaaattctagttttttgtttaaagagctgtgattttcaaaagtatcccttcagtttaagaaatctggggaattggtaacttttcttatgggaaatgattgccatcatctctactgaaggatgcctcttactgaaaaatgtcttttgaaggagttcttgcctaaagcattctttggatgtaatttcatacactaaacatatagaccagtagttagtgggcccctcctcttaaacagtaacttttgaagtactgatacatgattaaaatgttagatatttttcactggagctaagacttaaaattagggcattttgaaaggtgtatttgtttctgtttcttgtttgatatattttggttatctactcttttaaaaaactaaacgtataaaaggtatcttcaaattactgagtgtttcatccatcccagtaggtgaagtattctccagtgaataaatctatatatatatatagattttaaatagcttgagcggtgtagcttgaaatgttttcagggaaagactatttgaatcataaggaatagctttgattttcttttttatgtctcaaatatagaattatttgggggtggtcactcagatggaagaatattggcaattgtgttgaacattttaccttatatagttttgagaatttttgccaaaaactgatttcttagaaatatcctcccccagctgtgctttggttttttggtttttttgttttgagacggagtcttgctctgtcgcccaggctggagtgcagtggcatgatctcggctcactgcaagctctgcctcccgggttcacgccattctcctgcctcagcctcccgagtagctgggactacggacgtccaccaccatgcccagctaattttttgtatttttagtagagacggggtttcaccgtgttagccaggatggtctcaatctcctgacccgcctccacctcccaaagtgctgggattacaggcatgagccaccacacccggcctctgctttgttttttaaaaaaaaagaaatgcaagagagggagggaggcagcctcctgaccataaaagctgatttcttgatttttttttcttttttttttgaaatggagtcttgctctgtctccaaggctggagtgcagtggcatggtctcagctcactgcagcctccgtttcctgggttcaagtgattgtcctgccttggccgctgagtagctaggattactggcacccgccacaaggcccagctaatttttgtatttttagtagagacagggtttgattatgttggacaggctggtctcaaactcctgacttcaagtgatccacccgcctcggcctcccaacgtgatgggactatagacatgagccatcatgcttggccttcttgattcttgaatacggggttttgaggtgaaagcatttcatgaaaacttaagttcatacacaagagcatcatgaatattctaaaagaggtatctgtgctttttttgtgaccacaaaatattacttcttatgaaatgtttacactaggtgaggaaaagttcattaattacctttaaaccgttccttattttttttaagattttaaattgtattttggcttttgcctccagtatcctttctggttgctctggtttgaattaagttcctattatgctgcagcacatatcaaccttccctaagtaaccatttcctggaatgtgaagcatcggtgccattagcagaccatatgcagaaatgtcgtgtacttgcatttcttttttgtgcactctataaggctggttgtgactcagatcagcttaactttttatattatgttatttcactaactgctacagtcaaaatgatcaaatctttgtacaatagaaaattatttaaattttatttttctactgacatttctaattctagtgtaaatgtttatcaataaaaaattactttcaattctgagttggaattatatttctttttggtggctaatgagtttaatcttttgtaataaaattgacttcagttttcattttttaaataacttaatatctagcatgtgtaactttttttatgttctacttcttactaatttatgataaaattcttgttcaaagttgtgattaaaccgtacttaacatgt

SEQ ID NO: 4384 - protein, 66 aa, Homosapiens [sequence omitted]

SEQ ID NO: 4385 - DNA, 4862 bp, Homosapiens
aggaggccaagttgggcggattgtttgagccgaggcattcaagaccagcctgggcaacacgatgtggtatggtgtattcctgtgggcactggtgtcttctctcttctttcatgtccctgctggattactggccctcttcaccctcagacatcacaaatatggtaggttcatgtctgtaagcatcctgttgatgggcatcgtgggaccaattactgctggaatcttgacaagtgcagctattgctggagtttaccgagcagcagggaaggaaatgataccatttgaagccctcacactgggcactggacagacattttgcgtcttggtggtctcctttttacggattttagctactctatagcatacatccttatgctgagatgttgaacttaaactttatggaatcctccaaaagaatacattatggagtgtagtgttttcttagttcttcaaagggaagcaacttggatgaacaggaacatgaaggacaacacatctcagccttttcttcattttgaagctcctagaattgaagacttatgtggactcctattgttctcaaccaaaacaagtcttttggctttcttttttgtagatatttgatttaagcagttttcatgtgtacctttacccaagccaagtcaacagtgtctctggggtggcatcctttgcactgaaatttacagtattctgtgagatgtcgcatattttgaagaaaccgtggaagatactggtttatttcaaatgagcagagtatgttgtattaaaatcttatctaatcttgattaaaatttggcaaactcttttctttgctacatcttagtgacaataaatgccaaataggttttggttgagtatagttttgaaaacaaatttggtgaaataaagcaggaaaaaaaatttaagtataactcaagtagtggctttggttccactgtttataaataaaaagtagataacaatgaataatgtgacattttctggacaactgtcttgacttctgattaagatattttaagagatgtgaatttgttattttgtatgttttatcaaaataagctagctaatttagactttttagattttctgtaccacctttccctatcacttttaattctcttaattttatttcatttaattggaaacatacataccctattaaatggcttgagttggaaattttaagccagatttgtttggacattgaggcacacataagatactttaggcattctgtcatagtttttcttagtgactttggtatactaatgacccttgagaaactatagaagtgcatctgaaactagagttagtggttattgattttttagcttaatgtgtttacctagtggtaactcttcagcccacttttacagtattgggtatcaactcccagaaagtgcctaaagtttaatgttcagatatgtacccactctcccctttacatttttattcaaaagaatttatatctttaaagagatttaaatatcaagagtttttttaaaacttaattttagctatttaaatttttattctactgcctaactttctttttcattaaaaggcctgaaaactgtgactctttgagagggaaagaatcgcagaaattaagtatttaatgtgatcctttccacctaaactgttttgtatggaatacaatcagtgtggtggtagtggtggtggttatctgcaaaatagtttctggtgattaaatctgacttttttttttttttttcttttaaatgagacggagcctcactgtgttgcccaggctggagtgcagtggtgcaatctcagctcactccaacctctgccacccgggttcaagcgattctcctgcctcagtttcctgagtagctgggattacaggcacctgccaccgtgcccggctaatttttgtatttttagtagagataggtttcaccatcttgcccaggctggtcttgaactcctgaccttgtgatccacccgcctcggcctcccaaagtgctgggattacaggcgtgagccaccgcgcctggccataaatctgacatctttaaaggaaagttttcattgtgagattaaggcttaacagcccatgaggtcatatacacatgaacgtatctattccatttaaagcaatacacactctggcttctgattaaaaatagccaggaggagagtctctgaatctactgtgattctggagtctgcccaatttggaaaaaaaaaaaaaagaaaaaagtcaggaggaccaatttgccagggaaactcatagaaaagaattacaaagagatcacaaaaactggacatattcttttgactaattagaccacttatggctgggcgcagtggctcacacctataatcccagcactttgggaggtcgatgtgggaggattgcttgagcccaagagttcaagactggcctgggcaacatagtgagaccttgtctctactacaaaataaaaaaaaattagctgggcgtggcctcagctacccaagaggctaaagtgggaggatcacttgtgcctgggaggttcaggctgctgtgagccgagaccacgccactgaactccagcttaggccacagggcaagaccctgtcttaaaataatattactaattttggtaattaacttatcaaaactatagtgacatatacacgggcagaaacttataagtagagttgtaatgcagccaaatattcttacaaattccctaacaagaagctcaaatctttctcacaggcaaattgtaaaaattctagttttttgtttaaagagctgtgattttcaaaagtatcccttcagtttaagaaatctggggaattggtaacttttcttatgggaaatgattgccatcatctctactgaaggatgcctcttactgaaaaatgtcttttgaaggagttcttgcctaaagcattctttggatgtaatttcatacactaaacatatagaccagtagttagtgggcccctcctcttaaacagtaacttttgaagtactgatacatgattaaaatgttagatatttttcactggagctaagacttaaaattagggcattttgaaaggtgtatttgtttctgtttcttgtttgatatattttggttatctactcttttaaaaaactaaacgtataaaaggtatcttcaaattactgagtgtttcatccatcccagtaggtgaagtattctccagtgaataaatctatatatatatatagattttaaatagcttgagcggtgtagcttgaaatgttttcagggaaagactatttgaatcataaggaatagctttgattttcttttttatgtctcaaatatagaattatttgggggtggtcactcagatggaagaatattggcaattgtgttgaacattttaccttatatagttttgagaatttttgccaaaaactgatttcttagaaatatcctcccccagctgtgctttggttttttggtttttttgttttgagacggagtcttgctctgtcgcccaggctggagtgcagtggcatgatctcggctcactgcaagctctgcctcccgggttcacgccattctcctgcctcagcctcccgagtagctgggactacggacgtccaccaccatgcccagctaattttttgtatttttagtagagacggggtttcaccgtgttagccaggatggtctcaatctcctgacccgcctccacctcccaaagtgctgggattacaggcatgagccaccacacccggcctctgctttgttttttaaaaaaaaagaaatgcaagagagggagggaggcagcctcctgaccataaaagctgatttcttgatttttttttcttttttttttgaaatggagtcttgctctgtctccaaggctggagtgcagtggcatggtctcagctcactgcagcctccgtttcctgggttcaagtgattgtcctgccttggccgctgagtagctaggattactggcacccgccacaaggcccagctaatttttgtatttttagtagagacagggtttgattatgttggacaggctggtctcaaactcctgacttcaagtgatccacccgcctcggcctcccaacgtgatgggactatagacatgagccatcatgcttggccttcttgattcttgaatacggggttttgaggtgaaagcatttcatgaaaacttaagttcatacacaagagcatcatgaatattctaaaagaggtatctgtgctttttttgtgaccacaaaatattacttcttatgaaatgtttacactaggtgaggaaaagttcattaattacctttaaaccgttccttattttttttaagattttaaattgtattttggcttttgcctccagtatcctttctggttgctctggtttgaattaagttcctattatgctgcagcacatatcaaccttccctaagtaaccatttcctggaatgtgaagcatcggtgccattagcagaccatatgcagaaatgtcgtgtacttgcatttcttttttgtgcactctataaggctggttgtgactcagatcagcttaactttttatattatgttatttcactaactgctacagtcaaaatgatcaaatctttgtacaatagaaaattatttaaattttatttttctactgacatttctaattctagtgtaaatgtttatcaataaaaaattactttcaattctgagttggaattatatttctttttggtggctaatgagtttaatcttttgtaataaaattgacttcagttttcattttttaaataacttaatatctagcatgtgtaactttttttatgttctacttcttactaatttatgataaaattcttgttcaaagttgtgattaaaccgtacttaacatgt

SEQ ID NO: 4386 - protein, 99 aa, Homosapiens
MWYGVFLWALVSSLFFHVPAGLLALFTLRHHKYGRFMSVSILLMGIVGPITAGILTSAAIAGVYRAAGKEMIPFEALTLGTGQTFCVLVVSFLRILATL

SEQ ID NO: 4387 - DNA, 3418 bp, Homosapiens
gacgctgaggcggcgagggtgagtcggcgccggccgctaccgcacttcgggcgctcgtccctcatttctctgtggtgaatggcgacgggatggagcgcgaggggagcggcggcagcggcgggtcggccgggctcctgcagcagatcctgagcctgaaggttgtgccgcgggtgggcaacgggaccctgtgccccaactctacttccctctgctccttcccagagatgtggtatggtgtattcctgtgggcactggtgtcttctctcttctttcatgtccctgctggattactggccctcttcaccctcagacatcacaaatatggtgcagctattgctggagtttaccgagcagcagggaaggaaatgataccatttgaagccctcacactgggcactggacagacattttgcgtcttggtggtctcctttttacggattttagctactctatagcatacatccttatgctgagatgttgaacttaaactttatggaatcctccaaaagaatacattatggagtgtagtgttttcttagttcttcaaagggaagcaacttggatgaacaggaacatgaaggacaacacatctcagccttttcttcattttgaagctcctagaattgaagacttatgtggactcctattgttctcaaccaaaacaagtcttttggctttcttttttgtagatatttgatttaagcagttttcatgtgtacctttacccaagccaagtcaacagtgtctctggggtggcatcctttgcactgaaatttacagtattctgtgagatgtcgcatattttgaagaaaccgtggaagatactggtttatttcaaatgagcagagtatgttgtattaaaatcttatctaatcttgattaaaatttggcaaactcttttctttgctacatcttagtgacaataaatgccaaataggttttggttgagtatagttttgaaaacaaatttggtgaaataaagcaggaaaaaaaatttaagtataactcaagtagtggctttggttccactgtttataaataaaaagtagataacaatgaataatgtgacattttctggacaactgtcttgacttctgattaagatattttaagagatgtgaatttgttattttgtatgttttatcaaaataagctagctaatttagactttttagattttctgtaccacctttccctatcacttttaattctcttaattttatttcatttaattggaaacatacataccctattaaatggcttgagttggaaattttaagccagatttgtttggacattgaggcacacataagatactttaggcattctgtcatagtttttcttagtgactttggtatactaatgacccttgagaaactatagaagtgcatctgaaactagagttagtggttattgattttttagcttaatgtgtttacctagtggtaactcttcagcccacttttacagtattgggtatcaactcccagaaagtgcctaaagtttaatgttcagatatgtacccactctcccctttacatttttattcaaaagaatttatatctttaaagagatttaaatatcaagagtttttttaaaacttaattttagctatttaaatttttattctactgcctaactttctttttcattaaaaggcctgaaaactgtgactctttgagagggaaagaatcgcagaaattaagtatttaatgtgatcctttccacctaaactgttttgtatggaatacaatcagtgtggtggtagtggtggtggttatctgcaaaatagtttctggtgattaaatctgacttttttttttttttttcttttaaatgagacggagcctcactgtgttgcccaggctggagtgcagtggtgcaatctcagctcactccaacctctgccacccgggttcaagcgattctcctgcctcagtttcctgagtagctgggattacaggcacctgccaccgtgcccggctaatttttgtatttttagtagagataggtttcaccatcttgcccaggctggtcttgaactcctgaccttgtgatccacccgcctcggcctcccaaagtgctgggattacaggcgtgagccaccgcgcctggccataaatctgacatctttaaaggaaagttttcattgtgagattaaggcttaacagcccatgaggtcatatacacatgaacgtatctattccatttaaagcaatacacactctggcttctgattaaaaatagccaggaggagagtctctgaatctactgtgattctggagtctgcccaatttggaaaaaaaaaaaaaaaaatgcaagagagggagggaggcagcctcctgaccataaaagctgatttcttgatttttttttcttttttttttgaaatggagtcttgctctgtctccaaggctggagtgcagtggcatggtctcagctcactgcagcctccgtttcctgggttcaagtgattgtcctgccttggccgctgagtagctaggattactggcacccgccacaaggcccagctaatttttgtatttttagtagagacagggtttgattatgttggacaggctggtctcaaactcctgacttcaagtgatccacccgcctcggcctcccaacgtgatgggactatagacatgagccatcatgcttggccttcttgattcttgaatacggggttttgaggtgaaagcatttcatgaaaacttaagttcatacacaagagcatcatgaatattctaaaagaggtatctgtgctttttttgtgaccacaaaatattacttcttatgaaatgtttacactaggtgaggaaaagttcattaattacctttaaaccgttccttattttttttaagattttaaattgtattttggcttttgcctccagtatcctttctggttgctctggtttgaattaagttcctattatgctgcagcacatatcaaccttccctaagtaaccatttcctggaatgtgaagcatcggtgccattagcagaccatatgcagaaatgtcgtgtacttgcatttcttttttgtgcactctataaggctggttgtgactcagatcagcttaactttttatattatgttatttcactaactgctacagtcaaaatgatcaaatctttgtacaatagaaaattatttaaattttatttttctactgacatttctaattctagtgtaaatgtttatcaataaaaaattactttcaattctgagttggaattatatttctttttggtggctaatgagtttaatcttttgtaataaaattgacttcagttttcattttttaaataacttaatatctagcatgtgtaactttttttatgttctacttcttactaatttatgataaaattcttgttcaaagttgtgattaaaccgtacttaacatgt

SEQ ID NO: 4388 - protein, 121 aa, Homosapiens
MEREGSGGSGGSAGLLQQILSLKVVPRVGNGTLCPNSTSLCSFPEMWYGVFLWALVSSLFFHVPAGLLALFTLRHHKYGAAIAGVYRAAGKEMIPFEALTLGTGQTFCVLVVSFLRILATL

SEQ ID NO: 4389 - DNA, 5029 bp, Homosapiens
aggtgacgctgaggcggcgagggtgagtcggcgccggccgctaccgcacttcgggcgctcgtccctcatttctctgtggtgaatggcgacgggatggagcgcgaggggagcggcggcagcggcgggtcggccgggctcctgcagcagatcctgagcctgaaggttgtgccgcgggtgggcaacgggaccctgtgccccaactctacttccctctgctccttcccagagatgtggtatggtgtattcctgtgggcactggtgtcttctctcttctttcatgtccctgctggattactggccctcttcaccctcagacatcacaaatatggtaggttcatgtctgtaagcatcctgttgatgggcatcgtgggaccaattactgctggaatcttgacaagtgcagctattgctggagtttaccgagcagcagggaaggaaatgataccatttgaagccctcacactgggcactggacagacattttgcgtcttggtggtctcctttttacggattttagctactctatagcatacatccttatgctgagatgttgaacttaaactttatggaatcctccaaaagaatacattatggagtgtagtgttttcttagttcttcaaagggaagcaacttggatgaacaggaacatgaaggacaacacatctcagccttttcttcattttgaagctcctagaattgaagacttatgtggactcctattgttctcaaccaaaacaagtcttttggctttcttttttgtagatatttgatttaagcagttttcatgtgtacctttacccaagccaagtcaacagtgtctctggggtggcatcctttgcactgaaatttacagtattctgtgagatgtcgcatattttgaagaaaccgtggaagatactggtttatttcaaatgagcagagtatgttgtattaaaatcttatctaatcttgattaaaatttggcaaactcttttctttgctacatcttagtgacaataaatgccaaataggttttggttgagtatagttttgaaaacaaatttggtgaaataaagcaggaaaaaaaatttaagtataactcaagtagtggctttggttccactgtttataaataaaaagtagataacaatgaataatgtgacattttctggacaactgtcttgacttctgattaagatattttaagagatgtgaatttgttattttgtatgttttatcaaaataagctagctaatttagactttttagattttctgtaccacctttccctatcacttttaattctcttaattttatttcatttaattggaaacatacataccctattaaatggcttgagttggaaattttaagccagatttgtttggacattgaggcacacataagatactttaggcattctgtcatagtttttcttagtgactttggtatactaatgacccttgagaaactatagaagtgcatctgaaactagagttagtggttattgattttttagcttaatgtgtttacctagtggtaactcttcagcccacttttacagtattgggtatcaactcccagaaagtgcctaaagtttaatgttcagatatgtacccactctcccctttacatttttattcaaaagaatttatatctttaaagagatttaaatatcaagagtttttttaaaacttaattttagctatttaaatttttattctactgcctaactttctttttcattaaaaggcctgaaaactgtgactctttgagagggaaagaatcgcagaaattaagtatttaatgtgatcctttccacctaaactgttttgtatggaatacaatcagtgtggtggtagtggtggtggttatctgcaaaatagtttctggtgattaaatctgacttttttttttttttttcttttaaatgagacggagcctcactgtgttgcccaggctggagtgcagtggtgcaatctcagctcactccaacctctgccacccgggttcaagcgattctcctgcctcagtttcctgagtagctgggattacaggcacctgccaccgtgcccggctaatttttgtatttttagtagagataggtttcaccatcttgcccaggctggtcttgaactcctgaccttgtgatccacccgcctcggcctcccaaagtgctgggattacaggcgtgagccaccgcgcctggccataaatctgacatctttaaaggaaagttttcattgtgagattaaggcttaacagcccatgaggtcatatacacatgaacgtatctattccatttaaagcaatacacactctggcttctgattaaaaatagccaggaggagagtctctgaatctactgtgattctggagtctgcccaatttggaaaaaaaaaaaaaagaaaaaagtcaggaggaccaatttgccagggaaactcatagaaaagaattacaaagagatcacaaaaactggacatattcttttgactaattagaccacttatggctgggcgcagtggctcacacctataatcccagcactttgggaggtcgatgtgggaggattgcttgagcccaagagttcaagactggcctgggcaacatagtgagaccttgtctctactacaaaataaaaaaaaattagctgggcgtggcctcagctacccaagaggctaaagtgggaggatcacttgtgcctgggaggttcaggctgctgtgagccgagaccacgccactgaactccagcttaggccacagggcaagaccctgtcttaaaataatattactaattttggtaattaacttatcaaaactatagtgacatatacacgggcagaaacttataagtagagttgtaatgcagccaaatattcttacaaattccctaacaagaagctcaaatctttctcacaggcaaattgtaaaaattctagttttttgtttaaagagctgtgattttcaaaagtatcccttcagtttaagaaatctggggaattggtaacttttcttatgggaaatgattgccatcatctctactgaaggatgcctcttactgaaaaatgtcttttgaaggagttcttgcctaaagcattctttggatgtaatttcatacactaaacatatagaccagtagttagtgggcccctcctcttaaacagtaacttttgaagtactgatacatgattaaaatgttagatatttttcactggagctaagacttaaaattagggcattttgaaaggtgtatttgtttctgtttcttgtttgatatattttggttatctactcttttaaaaaactaaacgtataaaaggtatcttcaaattactgagtgtttcatccatcccagtaggtgaagtattctccagtgaataaatctatatatatatatagattttaaatagcttgagcggtgtagcttgaaatgttttcagggaaagactatttgaatcataaggaatagctttgattttcttttttatgtctcaaatatagaattatttgggggtggtcactcagatggaagaatattggcaattgtgttgaacattttaccttatatagttttgagaatttttgccaaaaactgatttcttagaaatatcctcccccagctgtgctttggttttttggtttttttgttttgagacggagtcttgctctgtcgcccaggctggagtgcagtggcatgatctcggctcactgcaagctctgcctcccgggttcacgccattctcctgcctcagcctcccgagtagctgggactacggacgtccaccaccatgcccagctaattttttgtatttttagtagagacggggtttcaccgtgttagccaggatggtctcaatctcctgacccgcctccacctcccaaagtgctgggattacaggcatgagccaccacacccggcctctgctttgttttttaaaaaaaaagaaatgcaagagagggagggaggcagcctcctgaccataaaagctgatttcttgatttttttttcttttttttttgaaatggagtcttgctctgtctccaaggctggagtgcagtggcatggtctcagctcactgcagcctccgtttcctgggttcaagtgattgtcctgccttggccgctgagtagctaggattactggcacccgccacaaggcccagctaatttttgtatttttagtagagacagggtttgattatgttggacaggctggtctcaaactcctgacttcaagtgatccacccgcctcggcctcccaacgtgatgggactatagacatgagccatcatgcttggccttcttgattcttgaatacggggttttgaggtgaaagcatttcatgaaaacttaagttcatacacaagagcatcatgaatattctaaaagaggtatctgtgctttttttgtgaccacaaaatattacttcttatgaaatgtttacactaggtgaggaaaagttcattaattacctttaaaccgttccttattttttttaagattttaaattgtattttggcttttgcctccagtatcctttctggttgctctggtttgaattaagttcctattatgctgcagcacatatcaaccttccctaagtaaccatttcctggaatgtgaagcatcggtgccattagcagaccatatgcagaaatgtcgtgtacttgcatttcttttttgtgcactctataaggctggttgtgactcagatcagcttaactttttatattatgttatttcactaactgctacagtcaaaatgatcaaatctttgtacaatagaaaattatttaaattttatttttctactgacatttctaattctagtgtaaatgtttatcaataaaaaattactttcaattctgagttggaattatatttctttttggtggctaatgagtttaatcttttgtaataaaattgacttcagttttcattttttaaataacttaatatctagcatgtgtaactttttttatgttctacttcttactaatttatgataaaattcttgttcaaagttgtgattaaaccgtacttaacatgt

SEQ ID NO: 4390 - protein, 144 aa, Homosapiens; identical to SEQ ID NO: 622

SEQ ID NO: 4391 - DNA, 5345 bp, Homosapiens
cgctgcggcgccttgtgattggaggaggcaacggtcacttggcagcgccgttgggattgggggaagaggaccccggctggaggtgacgctgaggcggcgagggtgagtcggcgccggccgctaccgcacttcgggcgctcgtccctcatttctctgtggtgaatggcgacgggatggagcgcgaggggagcggcggcagcggcgggtcggccgggctcctgcagcagatcctgagcctgaaggttgtgccgcgggtgggcaacgggaccctgtgccccaactctacttccctctgctccttcccaggtacggcccgccccgcgcctgcgcactgcgcgccccgccgtcgccgctgccgtgctgtgggcgccccgagtctgggcggggtcccgggtgcgcagcctgctggcggcgtgggcgctgtcctccgggaggggggccgtgctgctcgcccggagcccctttccccatcacttcttcggcggtccctgaggcggagccccggagtcccgctgggcgtgagatgcagagagcggccgcagagatgtggtatggtgtattcctgtgggcactggtgtcttctctcttctttcatgtccctgctggattactggccctcttcaccctcagacatcacaaatatggtaggttcatgtctgtaagcatcctgttgatgggcatcgtgggaccaattactgctggaatcttgacaagtgcagctattgctggagtttaccgagcagcagggaaggaaatgataccatttgaagccctcacactgggcactggacagacattttgcgtcttggtggtctcctttttacggattttagctactctatagcatacatccttatgctgagatgttgaacttaaactttatggaatcctccaaaagaatacattatggagtgtagtgttttcttagttcttcaaagggaagcaacttggatgaacaggaacatgaaggacaacacatctcagccttttcttcattttgaagctcctagaattgaagacttatgtggactcctattgttctcaaccaaaacaagtcttttggctttcttttttgtagatatttgatttaagcagttttcatgtgtacctttacccaagccaagtcaacagtgtctctggggtggcatcctttgcactgaaatttacagtattctgtgagatgtcgcatattttgaagaaaccgtggaagatactggtttatttcaaatgagcagagtatgttgtattaaaatcttatctaatcttgattaaaatttggcaaactcttttctttgctacatcttagtgacaataaatgccaaataggttttggttgagtatagttttgaaaacaaatttggtgaaataaagcaggaaaaaaaatttaagtataactcaagtagtggctttggttccactgtttataaataaaaagtagataacaatgaataatgtgacattttctggacaactgtcttgacttctgattaagatattttaagagatgtgaatttgttattttgtatgttttatcaaaataagctagctaatttagactttttagattttctgtaccacctttccctatcacttttaattctcttaattttatttcatttaattggaaacatacataccctattaaatggcttgagttggaaattttaagccagatttgtttggacattgaggcacacataagatactttaggcattctgtcatagtttttcttagtgactttggtatactaatgacccttgagaaactatagaagtgcatctgaaactagagttagtggttattgattttttagcttaatgtgtttacctagtggtaactcttcagcccacttttacagtattgggtatcaactcccagaaagtgcctaaagtttaatgttcagatatgtacccactctcccctttacatttttattcaaaagaatttatatctttaaagagatttaaatatcaagagtttttttaaaacttaattttagctatttaaatttttattctactgcctaactttctttttcattaaaaggcctgaaaactgtgactctttgagagggaaagaatcgcagaaattaagtatttaatgtgatcctttccacctaaactgttttgtatggaatacaatcagtgtggtggtagtggtggtggttatctgcaaaatagtttctggtgattaaatctgacttttttttttttttttcttttaaatgagacggagcctcactgtgttgcccaggctggagtgcagtggtgcaatctcagctcactccaacctctgccacccgggttcaagcgattctcctgcctcagtttcctgagtagctgggattacaggcacctgccaccgtgcccggctaatttttgtatttttagtagagataggtttcaccatcttgcccaggctggtcttgaactcctgaccttgtgatccacccgcctcggcctcccaaagtgctgggattacaggcgtgagccaccgcgcctggccataaatctgacatctttaaaggaaagttttcattgtgagattaaggcttaacagcccatgaggtcatatacacatgaacgtatctattccatttaaagcaatacacactctggcttctgattaaaaatagccaggaggagagtctctgaatctactgtgattctggagtctgcccaatttggaaaaaaaaaaaaaagaaaaaagtcaggaggaccaatttgccagggaaactcatagaaaagaattacaaagagatcacaaaaactggacatattcttttgactaattagaccacttatggctgggcgcagtggctcacacctataatcccagcactttgggaggtcgatgtgggaggattgcttgagcccaagagttcaagactggcctgggcaacatagtgagaccttgtctctactacaaaataaaaaaaaattagctgggcgtggcctcagctacccaagaggctaaagtgggaggatcacttgtgcctgggaggttcaggctgctgtgagccgagaccacgccactgaactccagcttaggccacagggcaagaccctgtcttaaaataatattactaattttggtaattaacttatcaaaactatagtgacatatacacgggcagaaacttataagtagagttgtaatgcagccaaatattcttacaaattccctaacaagaagctcaaatctttctcacaggcaaattgtaaaaattctagttttttgtttaaagagctgtgattttcaaaagtatcccttcagtttaagaaatctggggaattggtaacttttcttatgggaaatgattgccatcatctctactgaaggatgcctcttactgaaaaatgtcttttgaaggagttcttgcctaaagcattctttggatgtaatttcatacactaaacatatagaccagtagttagtgggcccctcctcttaaacagtaacttttgaagtactgatacatgattaaaatgttagatatttttcactggagctaagacttaaaattagggcattttgaaaggtgtatttgtttctgtttcttgtttgatatattttggttatctactcttttaaaaaactaaacgtataaaaggtatcttcaaattactgagtgtttcatccatcccagtaggtgaagtattctccagtgaataaatctatatatatatatagattttaaatagcttgagcggtgtagcttgaaatgttttcagggaaagactatttgaatcataaggaatagctttgattttcttttttatgtctcaaatatagaattatttgggggtggtcactcagatggaagaatattggcaattgtgttgaacattttaccttatatagttttgagaatttttgccaaaaactgatttcttagaaatatcctcccccagctgtgctttggttttttggtttttttgttttgagacggagtcttgctctgtcgcccaggctggagtgcagtggcatgatctcggctcactgcaagctctgcctcccgggttcacgccattctcctgcctcagcctcccgagtagctgggactacggacgtccaccaccatgcccagctaattttttgtatttttagtagagacggggtttcaccgtgttagccaggatggtctcaatctcctgacccgcctccacctcccaaagtgctgggattacaggcatgagccaccacacccggcctctgctttgttttttaaaaaaaaagaaatgcaagagagggagggaggcagcctcctgaccataaaagctgatttcttgatttttttttcttttttttttgaaatggagtcttgctctgtctccaaggctggagtgcagtggcatggtctcagctcactgcagcctccgtttcctgggttcaagtgattgtcctgccttggccgctgagtagctaggattactggcacccgccacaaggcccagctaatttttgtatttttagtagagacagggtttgattatgttggacaggctggtctcaaactcctgacttcaagtgatccacccgcctcggcctcccaacgtgatgggactatagacatgagccatcatgcttggccttcttgattcttgaatacggggttttgaggtgaaagcatttcatgaaaacttaagttcatacacaagagcatcatgaatattctaaaagaggtatctgtgctttttttgtgaccacaaaatattacttcttatgaaatgtttacactaggtgaggaaaagttcattaattacctttaaaccgttccttattttttttaagattttaaattgtattttggcttttgcctccagtatcctttctggttgctctggtttgaattaagttcctattatgctgcagcacatatcaaccttccctaagtaaccatttcctggaatgtgaagcatcggtgccattagcagaccatatgcagaaatgtcgtgtacttgcatttcttttttgtgcactctataaggctggttgtgactcagatcagcttaactttttatattatgttatttcactaactgctacagtcaaaatgatcaaatctttgtacaatagaaaattatttaaattttatttttctactgacatttctaattctagtgtaaatgtttatcaataaaaaattactttcaattctgagttggaattatatttctttttggtggctaatgagtttaatcttttgtaataaaattgacttcagttttcattttttaaataacttaatatctagcatgtgtaactttttttatgttctacttcttactaatttatgataaaattcttgttcaaagttgtgattaaaccgtacttaacatgt

SEQ ID NO: 4392 - protein, 162 aa, Homosapiens
MEREGSGGSGGSAGLLQQILSLKVVPRVGNGTLCPNSTSLCSFPGTARPAPAHCAPRRRRCRAVGAPSLGGVPGAQPAGGVGAVLREGGRAARPEPLSPSLLRRSLRRSPGVPLGVRCRERPQRCGMVYSCGHWCLLSSFMSLLDYWPSSPSDITNMVGSCL

SEQ ID NO: 4393 - DNA, 4136 bp, Homosapiens
aaaagaatacattatggagtgtagtgttttcttagttcttcaaagggaagcaacttggatgaacaggaacatgaaggacaacacatctcagccttttcttcattttgaagctcctagaattgaagacttatgtggactcctattgttctcaaccaaaacaagtcttttggctttcttttttgtagatatttgatttaagcagttttcatgtgtacctttacccaagccaagtcaacagtgtctctggggtggcatcctttgcactgaaatttacagtattctgtgagatgtcgcatattttgaagaaaccgtggaagatactggtttatttcaaatgagcagagtatgttgtattaaaatcttatctaatcttgattaaaatttggcaaactcttttctttgctacatcttagtgacaataaatgccaaataggttttggttgagtatagttttgaaaacaaatttggtgaaataaagcaggaaaaaaaatttaagtataactcaagtagtggctttggttccactgtttataaataaaaagtagataacaatgaataatgtgacattttctggacaactgtcttgacttctgattaagatattttaagagatgtgaatttgttattttgtatgttttatcaaaataagctagctaatttagactttttagattttctgtaccacctttccctatcacttttaattctcttaattttatttcatttaattggaaacatacataccctattaaatggcttgagttggaaattttaagccagatttgtttggacattgaggcacacataagatactttaggcattctgtcatagtttttcttagtgactttggtatactaatgacccttgagaaactatagaagtgcatctgaaactagagttagtggttattgattttttagcttaatgtgtttacctagtggtaactcttcagcccacttttacagtattgggtatcaactcccagaaagtgcctaaagtttaatgttcagatatgtacccactctcccctttacatttttattcaaaagaatttatatctttaaagagatttaaatatcaagagtttttttaaaacttaattttagctatttaaatttttattctactgcctaactttctttttcattaaaaggcctgaaaactgtgactctttgagagggaaagaatcgcagaaattaagtatttaatgtgatcctttccacctaaactgttttgtatggaatacaatcagtgtggtggtagtggtggtggttatctgcaaaatagtttctggtgattaaatctgacttttttttttttttttcttttaaatgagacggagcctcactgtgttgcccaggctggagtgcagtggtgcaatctcagctcactccaacctctgccacccgggttcaagcgattctcctgcctcagtttcctgatgctgggattacaggcgtgagccaccgcgcctggccataaatctgacatctttaaaggaaagttttcattgtgagattaaggcttaacagcccatgaggtcatatacacatgaacgtatctattccatttaaagcaatacacactctggcttctgattaaaaatagccaggaggagagtctctgaatctactgtgattctggagtctgcccaatttggaaaaaaaaaaaaaagaaaaaagtcaggaggaccaatttgccagggaaactcatagaaaagaattacaaagagatcacaaaaactggacatattcttttgactaattagaccacttatggctgggcgcagtggctcacacctataatcccagcactttgggaggtcgatgtgggaggattgcttgagcccaagagttcaagactggcctgggcaacatagtgagaccttgtctctactacaaaataaaaaaaaattagctgggcgtggcctcagctacccaagaggctaaagtgggaggatcacttgtgcctgggaggttcaggctgctgtgagccgagaccacgccactgaactccagcttaggccacagggcaagaccctgtcttaaaataatattactaattttggtaattaacttatcaaaactatagtgacatatacacgggcagaaacttataagtagagttgtaatgcagccaaatattcttacaaattccctaacaagaagctcaaatctttctcacaggcaaattgtaaaaattctagttttttgtttaaagagctgtgattttcaaaagtatcccttcagtttaagaaatctggggaattggtaacttttcttatgggaaatgattgccatcatctctactgaaggatgcctcttactgaaaaatgtcttttgaaggagttcttgcctaaagcattctttggatgtaatttcatacactaaacatatagaccagtagttagtgggcccctcctcttaaacagtaacttttgaagtactgatacatgattaaaatgttagatatttttcactggagctaagacttaaaattagggcattttgaaaggtgtatttgtttctgtttcttgtttgatatattttggttatctactcttttaaaaaactaaacgtataaaaggtatcttcaaattactgagtgtttcatccatcccagtaggtgaagtattctccagtgaataaatctatatatatatatagattttaaatagcttgagcggtgtagcttgaaatgttttcagggaaagactatttgaatcataaggaatagctttgattttcttttttatgtctcaaatatagaattatttgggggtggtcactcagatggaagaatattggcaattgtgttgaacattttaccttatatagttttgagaatttttgccaaaaactgatttcttagaaatatcctcccccagctgtgctttggttttttggtttttttgttttgagacggagtcttgctctgtcgcccaggctggagtgcagtggcatgatctcggctcactgcaagctctgcctcccgggttcacgccattctcctgcctcagcctcccgagtagctgggactacggacgtccaccaccatgcccagctaattttttgtatttttagtagagacggggtttcaccgtgttagccaggatggtctcaatctcctgacccgcctccacctcccaaagtgctgggattacaggcatgagccaccacacccggcctctgctttgttttttaaaaaaaaagaaatgcaagagagggagggaggcagcctcctgaccataaaagctgatttcttgatttttttttcttttttttttgaaatggagtcttgctctgtctccaaggctggagtgcagtggcatggtctcagctcactgcagcctccgtttcctgggttcaagtgattgtcctgccttggccgctgagtagctaggattactggcacccgccacaaggcccagctaatttttgtatttttagtagagacagggtttgattatgttggacaggctggtctcaaactcctgacttcaagtgatccacccgcctcggcctcccaacgtgatgggactatagacatgagccatcatgcttggccttcttgattcttgaatacggggttttgaggtgaaagcatttcatgaaaacttaagttcatacacaagagcatcatgaatattctaaaagaggtatctgtgctttttttgtgaccacaaaatattacttcttatgaaatgtttacactaggtgaggaaaagttcattaattacctttaaaccgttccttattttttttaagattttaaattgtattttggcttttgcctccagtatcctttctggttgctctggtttgaattaagttcctattatgctgcagcacatatcaaccttccctaagtaaccatttcctggaatgtgaagcatcggtgccattagcagaccatatgcagaaatgtcgtgtacttgcatttcttttttgtgcactctataaggctggttgtgactcagatcagcttaactttttatattatgttatttcactaactgctacagtcaaaatgatcaaatctttgtacaatagaaaattatttaaattttatttttctactgacatttctaattctagtgtaaatgtttatcaataaaaaattactttcaattctg

SEQ ID NO: 4394 - protein, 66 aa, Homosapiens [sequence omitted]

SEQ ID NO: 4395 - DNA, 4680 bp, Homosapiens
aggaggccaagttgggcggattgtttgagccgaggcattcaagaccagcctgggcaacacgatgtggtatggtgtattcctgtgggcactggtgtcttctctcttctttcatgtccctgctggattactggccctcttcaccctcagacatcacaaatatggtaggttcatgtctgtaagcatcctgttgatgggcatcgtgggaccaattactgctggaatcttgacaagtgcagctattgctggagtttaccgagcagcagggaaggaaatgataccatttgaagccctcacactgggcactggacagacattttgcgtcttggtggtctcctttttacggattttagctactctatagcatacatccttatgctgagatgttgaacttaaactttatggaatcctccaaaagaatacattatggagtgtagtgttttcttagttcttcaaagggaagcaacttggatgaacaggaacatgaaggacaacacatctcagccttttcttcattttgaagctcctagaattgaagacttatgtggactcctattgttctcaaccaaaacaagtcttttggctttcttttttgtagatatttgatttaagcagttttcatgtgtacctttacccaagccaagtcaacagtgtctctggggtggcatcctttgcactgaaatttacagtattctgtgagatgtcgcatattttgaagaaaccgtggaagatactggtttatttcaaatgagcagagtatgttgtattaaaatcttatctaatcttgattaaaatttggcaaactcttttctttgctacatcttagtgacaataaatgccaaataggttttggttgagtatagttttgaaaacaaatttggtgaaataaagcaggaaaaaaaatttaagtataactcaagtagtggctttggttccactgtttataaataaaaagtagataacaatgaataatgtgacattttctggacaactgtcttgacttctgattaagatattttaagagatgtgaatttgttattttgtatgttttatcaaaataagctagctaatttagactttttagattttctgtaccacctttccctatcacttttaattctcttaattttatttcatttaattggaaacatacataccctattaaatggcttgagttggaaattttaagccagatttgtttggacattgaggcacacataagatactttaggcattctgtcatagtttttcttagtgactttggtatactaatgacccttgagaaactatagaagtgcatctgaaactagagttagtggttattgattttttagcttaatgtgtttacctagtggtaactcttcagcccacttttacagtattgggtatcaactcccagaaagtgcctaaagtttaatgttcagatatgtacccactctcccctttacatttttattcaaaagaatttatatctttaaagagatttaaatatcaagagtttttttaaaacttaattttagctatttaaatttttattctactgcctaactttctttttcattaaaaggcctgaaaactgtgactctttgagagggaaagaatcgcagaaattaagtatttaatgtgatcctttccacctaaactgttttgtatggaatacaatcagtgtggtggtagtggtggtggttatctgcaaaatagtttctggtgattaaatctgacttttttttttttttttcttttaaatgagacggagcctcactgtgttgcccaggctggagtgcagtggtgcaatctcagctcactccaacctctgccacccgggttcaagcgattctcctgcctcagtttcctgagtagctgggattacaggcacctgccaccgtgcccggctaatttttgtatttttagtagagataggtttcaccatcttgcccaggctggtcttgaactcctgaccttgtgatccacccgcctcggcctcccaaagtgctgggattacaggcgtgagccaccgcgcctggccataaatctgacatctttaaaggaaagttttcattgtgagattaaggcttaacagcccatgaggtcatatacacatgaacgtatctattccatttaaagcaatacacactctggcttctgattaaaaatagccaggaggagagtctctgaatctactgtgattctggagtctgcccaatttggaaaaaaaaaaaaaagaaaaaagtcaggaggaccaatttgccagggaaactcatagaaaagaattacaaagagatcacaaaaactggacatattcttttgactaattagaccacttatggctgggcgcagtggctcacacctataatcccagcactttgggaggtcgatgtgggaggattgcttgagcccaagagttcaagactggcctgggcaacatagtgagaccttgtctctactacaaaataaaaaaaaattagctgggcgtggcctcagctacccaagaggctaaagtgggaggatcacttgtgcctgggaggttcaggctgctgtgagccgagaccacgccactgaactccagcttaggccacagggcaagaccctgtcttaaaataatattactaattttggtaattaacttatcaaaactatagtgacatatacacgggcagaaacttataagtagagttgtaatgcagccaaatattcttacaaattccctaacaagaagctcaaatctttctcacaggcaaattgtaaaaattctagttttttgtttaaagagctgtgattttcaaaagtatcccttcagtttaagaaatctggggaattggtaacttttcttatgggaaatgattgccatcatctctactgaaggatgcctcttactgaaaaatgtcttttgaaggagttcttgcctaaagcattctttggatgtaatttcatacactaaacatatagaccagtagttagtgggcccctcctcttaaacagtaacttttgaagtactgatacatgattaaaatgttagatatttttcactggagctaagacttaaaattagggcattttgaaaggtgtatttgtttctgtttcttgtttgatatattttggttatctactcttttaaaaaactaaacgtataaaaggtatcttcaaattactgagtgtttcatccatcccagtaggtgaagtattctccagtgaataaatctatatatatatatagattttaaatagcttgagcggtgtagcttgaaatgttttcagggaaagactatttgaatcataaggaatagctttgattttcttttttatgtctcaaatatagaattatttgggggtggtcactcagatggaagaatattggcaattgtgttgaacattttaccttatatagttttgagaatttttgccaaaaactgatttcttagaaatatcctcccccagctgtgctttggttttttggtttttttgttttgagacggagtcttgctctgtcgcccaggctggagtgcagtggcatgatctcggctcactgcaagctctgcctcccgggttcacgccattctcctgcctcagcctcccgagtagctgggactacggacgtccaccaccatgcccagctaattttttgtatttttagtagagacggggtttcaccgtgttagccaggatggtctcaatctcctgacccgcctccacctcccaaagtgctgggattacaggcatgagccaccacacccggcctctgctttgttttttaaaaaaaaagaaatgcaagagagggagggaggcagcctcctgaccataaaagctgatttcttgatttttttttcttttttttttgaaatggagtcttgctctgtctccaaggctggagtgcagtggcatggtctcagctcactgcagcctccgtttcctgggttcaagtgattgtcctgccttggccgctgagtagctaggattactggcacccgccacaaggcccagctaatttttgtatttttagtagagacagggtttgattatgttggacaggctggtctcaaactcctgacttcaagtgatccacccgcctcggcctcccaacgtgatgggactatagacatgagccatcatgcttggccttcttgattcttgaatacggggttttgaggtgaaagcatttcatgaaaacttaagttcatacacaagagcatcatgaatattctaaaagaggtatctgtgctttttttgtgaccacaaaatattacttcttatgaaatgtttacactaggtgaggaaaagttcattaattacctttaaaccgttccttattttttttaagattttaaattgtattttggcttttgcctccagtatcctttctggttgctctggtttgaattaagttcctattatgctgcagcacatatcaaccttccctaagtaaccatttcctggaatgtgaagcatcggtgccattagcagaccatatgcagaaatgtcgtgtacttgcatttcttttttgtgcactctataaggctggttgtgactcagatcagcttaactttttatattatgttatttcactaactgctacagtcaaaatgatcaaatctttgtacaatagaaaattatttaaattttatttttctactgacatttctaattctagtgtaaatgtttatcaataaaaaattactttcaattctg

SEQ ID NO: 4396 - protein, 99 aa, Homosapiens; identical to SEQ ID NO: 4386

SEQ ID NO: 4397 - DNA, 4774 bp, Homosapiens
gacgctgaggcggcgagggtgagtcggcgccggccgctaccgcacttcgggcgctcgtccctcatttctctgtggtgaatggcgacgggatggagcgcgaggggagcggcggcagcggcgggtcggccgggctcctgcagcagatcctgagcctgaaggttgtgccgcgggtgggcaacgggaccctgtgccccaactctacttccctctgctccttcccagagatgtggtatggtgtattcctgtgggcactggtgtcttctctcttctttcatgtccctgctggattactggccctcttcaccctcagacatcacaaatatggtgcagctattgctggagtttaccgagcagcagggaaggaaatgataccatttgaagccctcacactgggcactggacagacattttgcgtcttggtggtctcctttttacggattttagctactctatagcatacatccttatgctgagatgttgaacttaaactttatggaatcctccaaaagaatacattatggagtgtagtgttttcttagttcttcaaagggaagcaacttggatgaacaggaacatgaaggacaacacatctcagccttttcttcattttgaagctcctagaattgaagacttatgtggactcctattgttctcaaccaaaacaagtcttttggctttcttttttgtagatatttgatttaagcagttttcatgtgtacctttacccaagccaagtcaacagtgtctctggggtggcatcctttgcactgaaatttacagtattctgtgagatgtcgcatattttgaagaaaccgtggaagatactggtttatttcaaatgagcagagtatgttgtattaaaatcttatctaatcttgattaaaatttggcaaactcttttctttgctacatcttagtgacaataaatgccaaataggttttggttgagtatagttttgaaaacaaatttggtgaaataaagcaggaaaaaaaatttaagtataactcaagtagtggctttggttccactgtttataaataaaaagtagataacaatgaataatgtgacattttctggacaactgtcttgacttctgattaagatattttaagagatgtgaatttgttattttgtatgttttatcaaaataagctagctaatttagactttttagattttctgtaccacctttccctatcacttttaattctcttaattttatttcatttaattggaaacatacataccctattaaatggcttgagttggaaattttaagccagatttgtttggacattgaggcacacataagatactttaggcattctgtcatagtttttcttagtgactttggtatactaatgacccttgagaaactatagaagtgcatctgaaactagagttagtggttattgattttttagcttaatgtgtttacctagtggtaactcttcagcccacttttacagtattgggtatcaactcccagaaagtgcctaaagtttaatgttcagatatgtacccactctcccctttacatttttattcaaaagaatttatatctttaaagagatttaaatatcaagagtttttttaaaacttaattttagctatttaaatttttattctactgcctaactttctttttcattaaaaggcctgaaaactgtgactctttgagagggaaagaatcgcagaaattaagtatttaatgtgatcctttccacctaaactgttttgtatggaatacaatcagtgtggtggtagtggtggtggttatctgcaaaatagtttctggtgattaaatctgacttttttttttttttttcttttaaatgagacggagcctcactgtgttgcccaggctggagtgcagtggtgcaatctcagctcactccaacctctgccacccgggttcaagcgattctcctgcctcagtttcctgagtagctgggattacaggcacctgccaccgtgcccggctaatttttgtatttttagtagagataggtttcaccatcttgcccaggctggtcttgaactcctgaccttgtgatccacccgcctcggcctcccaaagtgctgggattacaggcgtgagccaccgcgcctggccataaatctgacatctttaaaggaaagttttcattgtgagattaaggcttaacagcccatgaggtcatatacacatgaacgtatctattccatttaaagcaatacacactctggcttctgattaaaaatagccaggaggagagtctctgaatctactgtgattctggagtctgcccaatttggaaaaaaaaaaaaaagaaaaaagtcaggaggaccaatttgccagggaaactcatagaaaagaattacaaagagatcacaaaaactggacatattcttttgactaattagaccacttatggctgggcgcagtggctcacacctataatcccagcactttgggaggtcgatgtgggaggattgcttgagcccaagagttcaagactggcctgggcaacatagtgagaccttgtctctactacaaaataaaaaaaaattagctgggcgtggcctcagctacccaagaggctaaagtgggaggatcacttgtgcctgggaggttcaggctgctgtgagccgagaccacgccactgaactccagcttaggccacagggcaagaccctgtcttaaaataatattactaattttggtaattaacttatcaaaactatagtgacatatacacgggcagaaacttataagtagagttgtaatgcagccaaatattcttacaaattccctaacaagaagctcaaatctttctcacaggcaaattgtaaaaattctagttttttgtttaaagagctgtgattttcaaaagtatcccttcagtttaagaaatctggggaattggtaacttttcttatgggaaatgattgccatcatctctactgaaggatgcctcttactgaaaaatgtcttttgaaggagttcttgcctaaagcattctttggatgtaatttcatacactaaacatatagaccagtagttagtgggcccctcctcttaaacagtaacttttgaagtactgatacatgattaaaatgttagatatttttcactggagctaagacttaaaattagggcattttgaaaggtgtatttgtttctgtttcttgtttgatatattttggttatctactcttttaaaaaactaaacgtataaaaggtatcttcaaattactgagtgtttcatccatcccagtaggtgaagtattctccagtgaataaatctatatatatatatagattttaaatagcttgagcggtgtagcttgaaatgttttcagggaaagactatttgaatcataaggaatagctttgattttcttttttatgtctcaaatatagaattatttgggggtggtcactcagatggaagaatattggcaattgtgttgaacattttaccttatatagttttgagaatttttgccaaaaactgatttcttagaaatatcctcccccagctgtgctttggttttttggtttttttgttttgagacggagtcttgctctgtcgcccaggctggagtgcagtggcatgatctcggctcactgcaagctctgcctcccgggttcacgccattctcctgcctcagcctcccgagtagctgggactacggacgtccaccaccatgcccagctaattttttgtatttttagtagagacggggtttcaccgtgttagccaggatggtctcaatctcctgacccgcctccacctcccaaagtgctgggattacaggcatgagccaccacacccggcctctgctttgttttttaaaaaaaaagaaatgcaagagagggagggaggcagcctcctgaccataaaagctgatttcttgatttttttttcttttttttttgaaatggagtcttgctctgtctccaaggctggagtgcagtggcatggtctcagctcactgcagcctccgtttcctgggttcaagtgattgtcctgccttggccgctgagtagctaggattactggcacccgccacaaggcccagctaatttttgtatttttagtagagacagggtttgattatgttggacaggctggtctcaaactcctgacttcaagtgatccacccgcctcggcctcccaacgtgatgggactatagacatgagccatcatgcttggccttcttgattcttgaatacggggttttgaggtgaaagcatttcatgaaaacttaagttcatacacaagagcatcatgaatattctaaaagaggtatctgtgctttttttgtgaccacaaaatattacttcttatgaaatgtttacactaggtgaggaaaagttcattaattacctttaaaccgttccttattttttttaagattttaaattgtattttggcttttgcctccagtatcctttctggttgctctggtttgaattaagttcctattatgctgcagcacatatcaaccttccctaagtaaccatttcctggaatgtgaagcatcggtgccattagcagaccatatgcagaaatgtcgtgtacttgcatttcttttttgtgcactctataaggctggttgtgactcagatcagcttaactttttatattatgttatttcactaactgctacagtcaaaatgatcaaatctttgtacaatagaaaattatttaaattttatttttctactgacatttctaattctagtgtaaatgtttatcaataaaaaattactttcaattctg

SEQ ID NO: 4398 - protein, 121 aa, Homosapiens; identical to SEQ ID NO: 4388

SEQ ID NO: 4399 - DNA, 3236 bp, Homosapiens
gacgctgaggcggcgagggtgagtcggcgccggccgctaccgcacttcgggcgctcgtccctcatttctctgtggtgaatggcgacgggatggagcgcgaggggagcggcggcagcggcgggtcggccgggctcctgcagcagatcctgagcctgaaggttgtgccgcgggtgggcaacgggaccctgtgccccaactctacttccctctgctccttcccagagatgtggtatggtgtattcctgtgggcactggtgtcttctctcttctttcatgtccctgctggattactggccctcttcaccctcagacatcacaaatatggtgcagctattgctggagtttaccgagcagcagggaaggaaatgataccatttgaagccctcacactgggcactggacagacattttgcgtcttggtggtctcctttttacggattttagctactctatagcatacatccttatgctgagatgttgaacttaaactttatggaatcctccaaaagaatacattatggagtgtagtgttttcttagttcttcaaagggaagcaacttggatgaacaggaacatgaaggacaacacatctcagccttttcttcattttgaagctcctagaattgaagacttatgtggactcctattgttctcaaccaaaacaagtcttttggctttcttttttgtagatatttgatttaagcagttttcatgtgtacctttacccaagccaagtcaacagtgtctctggggtggcatcctttgcactgaaatttacagtattctgtgagatgtcgcatattttgaagaaaccgtggaagatactggtttatttcaaatgagcagagtatgttgtattaaaatcttatctaatcttgattaaaatttggcaaactcttttctttgctacatcttagtgacaataaatgccaaataggttttggttgagtatagttttgaaaacaaatttggtgaaataaagcaggaaaaaaaatttaagtataactcaagtagtggctttggttccactgtttataaataaaaagtagataacaatgaataatgtgacattttctggacaactgtcttgacttctgattaagatattttaagagatgtgaatttgttattttgtatgttttatcaaaataagctagctaatttagactttttagattttctgtaccacctttccctatcacttttaattctcttaattttatttcatttaattggaaacatacataccctattaaatggcttgagttggaaattttaagccagatttgtttggacattgaggcacacataagatactttaggcattctgtcatagtttttcttagtgactttggtatactaatgacccttgagaaactatagaagtgcatctgaaactagagttagtggttattgattttttagcttaatgtgtttacctagtggtaactcttcagcccacttttacagtattgggtatcaactcccagaaagtgcctaaagtttaatgttcagatatgtacccactctcccctttacatttttattcaaaagaatttatatctttaaagagatttaaatatcaagagtttttttaaaacttaattttagctatttaaatttttattctactgcctaactttctttttcattaaaaggcctgaaaactgtgactctttgagagggaaagaatcgcagaaattaagtatttaatgtgatcctttccacctaaactgttttgtatggaatacaatcagtgtggtggtagtggtggtggttatctgcaaaatagtttctggtgattaaatctgacttttttttttttttttcttttaaatgagacggagcctcactgtgttgcccaggctggagtgcagtggtgcaatctcagctcactccaacctctgccacccgggttcaagcgattctcctgcctcagtttcctgagtagctgggattacaggcacctgccaccgtgcccggctaatttttgtatttttagtagagataggtttcaccatcttgcccaggctggtcttgaactcctgaccttgtgatccacccgcctcggcctcccaaagtgctgggattacaggcgtgagccaccgcgcctggccataaatctgacatctttaaaggaaagttttcattgtgagattaaggcttaacagcccatgaggtcatatacacatgaacgtatctattccatttaaagcaatacacactctggcttctgattaaaaatagccaggaggagagtctctgaatctactgtgattctggagtctgcccaatttggaaaaaaaaaaaaaaaaatgcaagagagggagggaggcagcctcctgaccataaaagctgatttcttgatttttttttcttttttttttgaaatggagtcttgctctgtctccaaggctggagtgcagtggcatggtctcagctcactgcagcctccgtttcctgggttcaagtgattgtcctgccttggccgctgagtagctaggattactggcacccgccacaaggcccagctaatttttgtatttttagtagagacagggtttgattatgttggacaggctggtctcaaactcctgacttcaagtgatccacccgcctcggcctcccaacgtgatgggactatagacatgagccatcatgcttggccttcttgattcttgaatacggggttttgaggtgaaagcatttcatgaaaacttaagttcatacacaagagcatcatgaatattctaaaagaggtatctgtgctttttttgtgaccacaaaatattacttcttatgaaatgtttacactaggtgaggaaaagttcattaattacctttaaaccgttccttattttttttaagattttaaattgtattttggcttttgcctccagtatcctttctggttgctctggtttgaattaagttcctattatgctgcagcacatatcaaccttccctaagtaaccatttcctggaatgtgaagcatcggtgccattagcagaccatatgcagaaatgtcgtgtacttgcatttcttttttgtgcactctataaggctggttgtgactcagatcagcttaactttttatattatgttatttcactaactgctacagtcaaaatgatcaaatctttgtacaatagaaaattatttaaattttatttttctactgacatttctaattctagtgtaaatgtttatcaataaaaaattactttcaattctg

SEQ ID NO: 4400 - protein, 121 aa, Homosapiens; identical to SEQ ID NO: 4388

SEQ ID NO: 4401 - DNA, 4847 bp, Homosapiens
aggtgacgctgaggcggcgagggtgagtcggcgccggccgctaccgcacttcgggcgctcgtccctcatttctctgtggtgaatggcgacgggatggagcgcgaggggagcggcggcagcggcgggtcggccgggctcctgcagcagatcctgagcctgaaggttgtgccgcgggtgggcaacgggaccctgtgccccaactctacttccctctgctccttcccagagatgtggtatggtgtattcctgtgggcactggtgtcttctctcttctttcatgtccctgctggattactggccctcttcaccctcagacatcacaaatatggtaggttcatgtctgtaagcatcctgttgatgggcatcgtgggaccaattactgctggaatcttgacaagtgcagctattgctggagtttaccgagcagcagggaaggaaatgataccatttgaagccctcacactgggcactggacagacattttgcgtcttggtggtctcctttttacggattttagctactctatagcatacatccttatgctgagatgttgaacttaaactttatggaatcctccaaaagaatacattatggagtgtagtgttttcttagttcttcaaagggaagcaacttggatgaacaggaacatgaaggacaacacatctcagccttttcttcattttgaagctcctagaattgaagacttatgtggactcctattgttctcaaccaaaacaagtcttttggctttcttttttgtagatatttgatttaagcagttttcatgtgtacctttacccaagccaagtcaacagtgtctctggggtggcatcctttgcactgaaatttacagtattctgtgagatgtcgcatattttgaagaaaccgtggaagatactggtttatttcaaatgagcagagtatgttgtattaaaatcttatctaatcttgattaaaatttggcaaactcttttctttgctacatcttagtgacaataaatgccaaataggttttggttgagtatagttttgaaaacaaatttggtgaaataaagcaggaaaaaaaatttaagtataactcaagtagtggctttggttccactgtttataaataaaaagtagataacaatgaataatgtgacattttctggacaactgtcttgacttctgattaagatattttaagagatgtgaatttgttattttgtatgttttatcaaaataagctagctaatttagactttttagattttctgtaccacctttccctatcacttttaattctcttaattttatttcatttaattggaaacatacataccctattaaatggcttgagttggaaattttaagccagatttgtttggacattgaggcacacataagatactttaggcattctgtcatagtttttcttagtgactttggtatactaatgacccttgagaaactatagaagtgcatctgaaactagagttagtggttattgattttttagcttaatgtgtttacctagtggtaactcttcagcccacttttacagtattgggtatcaactcccagaaagtgcctaaagtttaatgttcagatatgtacccactctcccctttacatttttattcaaaagaatttatatctttaaagagatttaaatatcaagagtttttttaaaacttaattttagctatttaaatttttattctactgcctaactttctttttcattaaaaggcctgaaaactgtgactctttgagagggaaagaatcgcagaaattaagtatttaatgtgatcctttccacctaaactgttttgtatggaatacaatcagtgtggtggtagtggtggtggttatctgcaaaatagtttctggtgattaaatctgacttttttttttttttttcttttaaatgagacggagcctcactgtgttgcccaggctggagtgcagtggtgcaatctcagctcactccaacctctgccacccgggttcaagcgattctcctgcctcagtttcctgagtagctgggattacaggcacctgccaccgtgcccggctaatttttgtatttttagtagagataggtttcaccatcttgcccaggctggtcttgaactcctgaccttgtgatccacccgcctcggcctcccaaagtgctgggattacaggcgtgagccaccgcgcctggccataaatctgacatctttaaaggaaagttttcattgtgagattaaggcttaacagcccatgaggtcatatacacatgaacgtatctattccatttaaagcaatacacactctggcttctgattaaaaatagccaggaggagagtctctgaatctactgtgattctggagtctgcccaatttggaaaaaaaaaaaaaagaaaaaagtcaggaggaccaatttgccagggaaactcatagaaaagaattacaaagagatcacaaaaactggacatattcttttgactaattagaccacttatggctgggcgcagtggctcacacctataatcccagcactttgggaggtcgatgtgggaggattgcttgagcccaagagttcaagactggcctgggcaacatagtgagaccttgtctctactacaaaataaaaaaaaattagctgggcgtggcctcagctacccaagaggctaaagtgggaggatcacttgtgcctgggaggttcaggctgctgtgagccgagaccacgccactgaactccagcttaggccacagggcaagaccctgtcttaaaataatattactaattttggtaattaacttatcaaaactatagtgacatatacacgggcagaaacttataagtagagttgtaatgcagccaaatattcttacaaattccctaacaagaagctcaaatctttctcacaggcaaattgtaaaaattctagttttttgtttaaagagctgtgattttcaaaagtatcccttcagtttaagaaatctggggaattggtaacttttcttatgggaaatgattgccatcatctctactgaaggatgcctcttactgaaaaatgtcttttgaaggagttcttgcctaaagcattctttggatgtaatttcatacactaaacatatagaccagtagttagtgggcccctcctcttaaacagtaacttttgaagtactgatacatgattaaaatgttagatatttttcactggagctaagacttaaaattagggcattttgaaaggtgtatttgtttctgtttcttgtttgatatattttggttatctactcttttaaaaaactaaacgtataaaaggtatcttcaaattactgagtgtttcatccatcccagtaggtgaagtattctccagtgaataaatctatatatatatatagattttaaatagcttgagcggtgtagcttgaaatgttttcagggaaagactatttgaatcataaggaatagctttgattttcttttttatgtctcaaatatagaattatttgggggtggtcactcagatggaagaatattggcaattgtgttgaacattttaccttatatagttttgagaatttttgccaaaaactgatttcttagaaatatcctcccccagctgtgctttggttttttggtttttttgttttgagacggagtcttgctctgtcgcccaggctggagtgcagtggcatgatctcggctcactgcaagctctgcctcccgggttcacgccattctcctgcctcagcctcccgagtagctgggactacggacgtccaccaccatgcccagctaattttttgtatttttagtagagacggggtttcaccgtgttagccaggatggtctcaatctcctgacccgcctccacctcccaaagtgctgggattacaggcatgagccaccacacccggcctctgctttgttttttaaaaaaaaagaaatgcaagagagggagggaggcagcctcctgaccataaaagctgatttcttgatttttttttcttttttttttgaaatggagtcttgctctgtctccaaggctggagtgcagtggcatggtctcagctcactgcagcctccgtttcctgggttcaagtgattgtcctgccttggccgctgagtagctaggattactggcacccgccacaaggcccagctaatttttgtatttttagtagagacagggtttgattatgttggacaggctggtctcaaactcctgacttcaagtgatccacccgcctcggcctcccaacgtgatgggactatagacatgagccatcatgcttggccttcttgattcttgaatacggggttttgaggtgaaagcatttcatgaaaacttaagttcatacacaagagcatcatgaatattctaaaagaggtatctgtgctttttttgtgaccacaaaatattacttcttatgaaatgtttacactaggtgaggaaaagttcattaattacctttaaaccgttccttattttttttaagattttaaattgtattttggcttttgcctccagtatcctttctggttgctctggtttgaattaagttcctattatgctgcagcacatatcaaccttccctaagtaaccatttcctggaatgtgaagcatcggtgccattagcagaccatatgcagaaatgtcgtgtacttgcatttcttttttgtgcactctataaggctggttgtgactcagatcagcttaactttttatattatgttatttcactaactgctacagtcaaaatgatcaaatctttgtacaatagaaaattatttaaattttatttttctactgacatttctaattctagtgtaaatgtttatcaataaaaaattactttcaattctg

SEQ ID NO: 4402 - protein, 144 aa, Homosapiens; identical to SEQ ID NO: 622

SEQ ID NO: 4403 - DNA, 4402 bp, Homosapiens
acttggcagcgccgttgggattgggggaagaggaccccggctggaggtgacgctgaggcggcgagggtgagtcggcgccggccgctaccgcacttcgggcgctcgtccctcatttctctgtggtgaatggcgacgggatggagcgcgaggggagcggcggcagcggcgggtcggccgggctcctgcagcagatcctgagcctgaaggttgtgccgcgggtgggcaacgggaccctgtgccccaactctacttccctctgctccttcccagagatgtggtatggtgtattcctgtgggcactggtgtcttctctcttctttcatgtccctgctggattactggccctcttcaccctcagacatcacaaatatggtgcagctattgctggagtttaccgagcagcagggaaggaaatgataccatttgaagccctcacactgggcactggacagacattttgcgtcttggtggtctcctttttacggattttagctactctatagcatacatccttatgctgagatgttgaacttaaactttatggaatcctccaaaagaatacattatggagtgtagtgttttcttagttcttcaaagggaagcaacttggatgaacaggaacatgaaggacaacacatctcagccttttcttcattttgaagctcctagaattgaagacttatgtggactcctattgttctcaaccaaaacaagtcttttggctttcttttttgtagatatttgatttaagcagttttcatgtgtacctttacccaagccaagtcaacagtgtctctggggtggcatcctttgcactgaaatttacagtattctgtgagatgtcgcatattttgaagaaaccgtggaagatactggtttatttcaaatgagcagagtatgttgtattaaaatcttatctaatcttgattaaaatttggcaaactcttttctttgctacatcttagtgacaataaatgccaaataggttttggttgagtatagttttgaaaacaaatttggtgaaataaagcaggaaaaaaaatttaagtataactcaagtagtggctttggttccactgtttataaataaaaagtagataacaatgaataatgtgacattttctggacaactgtcttgacttctgattaagatattttaagagatgtgaatttgttattttgtatgttttatcaaaataagctagctaatttagactttttagattttctgtaccacctttccctatcacttttaattctcttaattttatttcatttaattggaaacatacataccctattaaatggcttgagttggaaattttaagccagatttgtttggacattgaggcacacataagatactttaggcattctgtcatagtttttcttagtgactttggtatactaatgacccttgagaaactatagaagtgcatctgaaactagagttagtggttattgattttttagcttaatgtgtttacctagtggtaactcttcagcccacttttacagtattgggtatcaactcccagaaagtgcctaaagtttaatgttcagatatgtacccactctcccctttacatttttattcaaaagaatttatatctttaaagagatttaaatatcaagagtttttttaaaacttaattttagctatttaaatttttattctactgcctaactttctttttcattaaaaggcctgaaaactgtgactctttgagagggaaagaatcgcagaaattaagtatttaatgtgatcctttccacctaaactgttttgtatggaatacaatcagtgtggtggtagtggtggtggttatctgcaaaatagtttctggtgattaaatctgacttttttttttttttttcttttaaatgagacggagcctcactgtgttgcccaggctggagtgcagtggtgcaatctcagctcactccaacctctgccacccgggttcaagcgattctcctgcctcagtttcctgagtagctgggattacaggcacctgccaccgtgcccggctaatttttgtatttttagtagagataggtttcaccatcttgcccagcactttgggaggtcgatgtgggaggattgcttgagcccaagagttcaagactggcctgggcaacatagtgagaccttgtctctactacaaaataaaaaaaaattagctgggcgtggcctcagctacccaagaggctaaagtgggaggatcacttgtgcctgggaggttcaggctgctgtgagccgagaccacgccactgaactccagcttaggccacagggcaagaccctgtcttaaaataatattactaattttggtaattaacttatcaaaactatagtgacatatacacgggcagaaacttataagtagagttgtaatgcagccaaatattcttacaaattccctaacaagaagctcaaatctttctcacaggcaaattgtaaaaattctagttttttgtttaaagagctgtgattttcaaaagtatcccttcagtttaagaaatctggggaattggtaacttttcttatgggaaatgattgccatcatctctactgaaggatgcctcttactgaaaaatgtcttttgaaggagttcttgcctaaagcattctttggatgtaatttcatacactaaacatatagaccagtagttagtgggcccctcctcttaaacagtaacttttgaagtactgatacatgattaaaatgttagatatttttcactggagctaagacttaaaattagggcattttgaaaggtgtatttgtttctgtttcttgtttgatatattttggttatctactcttttaaaaaactaaacgtataaaaggtatcttcaaattactgagtgtttcatccatcccagtaggtgaagtattctccagtgaataaatctatatatatatatagattttaaatagcttgagcggtgtagcttgaaatgttttcagggaaagactatttgaatcataaggaatagctttgattttcttttttatgtctcaaatatagaattatttgggggtggtcactcagatggaagaatattggcaattgtgttgaacattttaccttatatagttttgagaatttttgccaaaaactgatttcttagaaatatcctcccccagctgtgctttggttttttggtttttttgttttgagacggagtcttgctctgtcgcccaggctggagtgcagtggcatgatctcggctcactgcaagctctgcctcccgggttcacgccattctcctgcctcagcctcccgagtagctgggactacggacgtccaccaccatgcccagctaattttttgtatttttagtagagacggggtttcaccgtgttagccaggatggtctcaatctcctgacccgcctccacctcccaaagtgctgggattacaggcatgagccaccacacccggcctctgctttgttttttaaaaaaaaagaaatgcaagagagggagggaggcagcctcctgaccataaaagctgatttcttgatttttttttcttttttttttgaaatggagtcttgctctgtctccaaggctggagtgcagtggcatggtctcagctcactgcagcctccgtttcctgggttcaagtgattgtcctgccttggccgctgagtagctaggattactggcacccgccacaaggcccagctaatttttgtatttttagtagagacagggtttgattatgttggacaggctggtctcaaactcctgacttcaagtgatccacccgcctcggcctcccaacgtgatgggactatagacatgagccatcatgcttggccttcttgattcttgaatacggggttttgaggtgaaagcatttcatgaaaacttaagttcatacacaagagcatcatgaatattctaaaagaggtatctgtgctttttttgtgaccacaaaatattacttcttatgaaatgtttacactaggtgaggaaaagttcattaattacctttaaaccgttccttattttttttaagattttaaattgtattttggcttttgcctccagtatcctttctggttgctctggtttgaattaagttcctattatgctgcagcacatatcaaccttccctaagtaaccatttcctggaatgtgaagcatcggtgccattagcagaccatatgcagaaatgtcgtgtacttgcatttcttttttgtgcactctataaggctggttgtgactcagatcagcttaactttttatattatgttatttcactaactgctacagtcaaaatgatcaaatctttgtacaatagaaaattatttaaattttatttttctactgacatttctaattctagtgtaaatgtttatcaataaaaaattactttcaattctg

SEQ ID NO: 4404 - protein, 121 aa, Homosapiens; identical to SEQ ID NO: 4388

SEQ ID NO: 4405 - DNA, 5163 bp, Homosapiens
cgctgcggcgccttgtgattggaggaggcaacggtcacttggcagcgccgttgggattgggggaagaggaccccggctggaggtgacgctgaggcggcgagggtgagtcggcgccggccgctaccgcacttcgggcgctcgtccctcatttctctgtggtgaatggcgacgggatggagcgcgaggggagcggcggcagcggcgggtcggccgggctcctgcagcagatcctgagcctgaaggttgtgccgcgggtgggcaacgggaccctgtgccccaactctacttccctctgctccttcccaggtacggcccgccccgcgcctgcgcactgcgcgccccgccgtcgccgctgccgtgctgtgggcgccccgagtctgggcggggtcccgggtgcgcagcctgctggcggcgtgggcgctgtcctccgggaggggggccgtgctgctcgcccggagcccctttccccatcacttcttcggcggtccctgaggcggagccccggagtcccgctgggcgtgagatgcagagagcggccgcagagatgtggtatggtgtattcctgtgggcactggtgtcttctctcttctttcatgtccctgctggattactggccctcttcaccctcagacatcacaaatatggtaggttcatgtctgtaagcatcctgttgatgggcatcgtgggaccaattactgctggaatcttgacaagtgcagctattgctggagtttaccgagcagcagggaaggaaatgataccatttgaagccctcacactgggcactggacagacattttgcgtcttggtggtctcctttttacggattttagctactctatagcatacatccttatgctgagatgttgaacttaaactttatggaatcctccaaaagaatacattatggagtgtagtgttttcttagttcttcaaagggaagcaacttggatgaacaggaacatgaaggacaacacatctcagccttttcttcattttgaagctcctagaattgaagacttatgtggactcctattgttctcaaccaaaacaagtcttttggctttcttttttgtagatatttgatttaagcagttttcatgtgtacctttacccaagccaagtcaacagtgtctctggggtggcatcctttgcactgaaatttacagtattctgtgagatgtcgcatattttgaagaaaccgtggaagatactggtttatttcaaatgagcagagtatgttgtattaaaatcttatctaatcttgattaaaatttggcaaactcttttctttgctacatcttagtgacaataaatgccaaataggttttggttgagtatagttttgaaaacaaatttggtgaaataaagcaggaaaaaaaatttaagtataactcaagtagtggctttggttccactgtttataaataaaaagtagataacaatgaataatgtgacattttctggacaactgtcttgacttctgattaagatattttaagagatgtgaatttgttattttgtatgttttatcaaaataagctagctaatttagactttttagattttctgtaccacctttccctatcacttttaattctcttaattttatttcatttaattggaaacatacataccctattaaatggcttgagttggaaattttaagccagatttgtttggacattgaggcacacataagatactttaggcattctgtcatagtttttcttagtgactttggtatactaatgacccttgagaaactatagaagtgcatctgaaactagagttagtggttattgattttttagcttaatgtgtttacctagtggtaactcttcagcccacttttacagtattgggtatcaactcccagaaagtgcctaaagtttaatgttcagatatgtacccactctcccctttacatttttattcaaaagaatttatatctttaaagagatttaaatatcaagagtttttttaaaacttaattttagctatttaaatttttattctactgcctaactttctttttcattaaaaggcctgaaaactgtgactctttgagagggaaagaatcgcagaaattaagtatttaatgtgatcctttccacctaaactgttttgtatggaatacaatcagtgtggtggtagtggtggtggttatctgcaaaatagtttctggtgattaaatctgacttttttttttttttttcttttaaatgagacggagcctcactgtgttgcccaggctggagtgcagtggtgcaatctcagctcactccaacctctgccacccgggttcaagcgattctcctgcctcagtttcctgagtagctgggattacaggcacctgccaccgtgcccggctaatttttgtatttttagtagagataggtttcaccatcttgcccaggctggtcttgaactcctgaccttgtgatccacccgcctcggcctcccaaagtgctgggattacaggcgtgagccaccgcgcctggccataaatctgacatctttaaaggaaagttttcattgtgagattaaggcttaacagcccatgaggtcatatacacatgaacgtatctattccatttaaagcaatacacactctggcttctgattaaaaatagccaggaggagagtctctgaatctactgtgattctggagtctgcccaatttggaaaaaaaaaaaaaagaaaaaagtcaggaggaccaatttgccagggaaactcatagaaaagaattacaaagagatcacaaaaactggacatattcttttgactaattagaccacttatggctgggcgcagtggctcacacctataatcccagcactttgggaggtcgatgtgggaggattgcttgagcccaagagttcaagactggcctgggcaacatagtgagaccttgtctctactacaaaataaaaaaaaattagctgggcgtggcctcagctacccaagaggctaaagtgggaggatcacttgtgcctgggaggttcaggctgctgtgagccgagaccacgccactgaactccagcttaggccacagggcaagaccctgtcttaaaataatattactaattttggtaattaacttatcaaaactatagtgacatatacacgggcagaaacttataagtagagttgtaatgcagccaaatattcttacaaattccctaacaagaagctcaaatctttctcacaggcaaattgtaaaaattctagttttttgtttaaagagctgtgattttcaaaagtatcccttcagtttaagaaatctggggaattggtaacttttcttatgggaaatgattgccatcatctctactgaaggatgcctcttactgaaaaatgtcttttgaaggagttcttgcctaaagcattctttggatgtaatttcatacactaaacatatagaccagtagttagtgggcccctcctcttaaacagtaacttttgaagtactgatacatgattaaaatgttagatatttttcactggagctaagacttaaaattagggcattttgaaaggtgtatttgtttctgtttcttgtttgatatattttggttatctactcttttaaaaaactaaacgtataaaaggtatcttcaaattactgagtgtttcatccatcccagtaggtgaagtattctccagtgaataaatctatatatatatatagattttaaatagcttgagcggtgtagcttgaaatgttttcagggaaagactatttgaatcataaggaatagctttgattttcttttttatgtctcaaatatagaattatttgggggtggtcactcagatggaagaatattggcaattgtgttgaacattttaccttatatagttttgagaatttttgccaaaaactgatttcttagaaatatcctcccccagctgtgctttggttttttggtttttttgttttgagacggagtcttgctctgtcgcccaggctggagtgcagtggcatgatctcggctcactgcaagctctgcctcccgggttcacgccattctcctgcctcagcctcccgagtagctgggactacggacgtccaccaccatgcccagctaattttttgtatttttagtagagacggggtttcaccgtgttagccaggatggtctcaatctcctgacccgcctccacctcccaaagtgctgggattacaggcatgagccaccacacccggcctctgctttgttttttaaaaaaaaagaaatgcaagagagggagggaggcagcctcctgaccataaaagctgatttcttgatttttttttcttttttttttgaaatggagtcttgctctgtctccaaggctggagtgcagtggcatggtctcagctcactgcagcctccgtttcctgggttcaagtgattgtcctgccttggccgctgagtagctaggattactggcacccgccacaaggcccagctaatttttgtatttttagtagagacagggtttgattatgttggacaggctggtctcaaactcctgacttcaagtgatccacccgcctcggcctcccaacgtgatgggactatagacatgagccatcatgcttggccttcttgattcttgaatacggggttttgaggtgaaagcatttcatgaaaacttaagttcatacacaagagcatcatgaatattctaaaagaggtatctgtgctttttttgtgaccacaaaatattacttcttatgaaatgtttacactaggtgaggaaaagttcattaattacctttaaaccgttccttattttttttaagattttaaattgtattttggcttttgcctccagtatcctttctggttgctctggtttgaattaagttcctattatgctgcagcacatatcaaccttccctaagtaaccatttcctggaatgtgaagcatcggtgccattagcagaccatatgcagaaatgtcgtgtacttgcatttcttttttgtgcactctataaggctggttgtgactcagatcagcttaactttttatattatgttatttcactaactgctacagtcaaaatgatcaaatctttgtacaatagaaaattatttaaattttatttttctactgacatttctaattctagtgtaaatgtttatcaataaaaaattactttcaattctg

SEQ ID NO: 4406 - protein, 162 aa, Homosapiens; identical to SEQ ID NO: 4392

SEQ ID NO: 4407 - DNA, 907 bp, Homosapiens
aggaggccaagttgggcggattgtttgagccgaggcattcaagaccagcctgggcaacacgatgtggtatggtgtattcctgtgggcactggtgtcttctctcttctttcatgtccctgctggattactggccctcttcaccctcagacatcacaaatatggtaggttcatgtctgtaagcatcctgttgatgggcatcgtgggaccaattactgctggaatcttgacaagtgcagctattgctggagtttaccgagcagcagggaaggaaatgataccatttgaagccctcacactgggcactggacagacattttgcgtcttggtggtctcctttttacggattttagctactctatagcatacatccttatgctgagatgttgaacttaaactttatggaatcctccaaaagaatacattatggagtgtagtgttttcttagttcttcaaagggaagcaacttggatgaacaggaacatgaaggacaacacatctcagccttttcttcattttgaagctcctagaattgaagacttatgtggactcctattgttctcaaccaaaacaagtcttttggctttcttttttgtagatatttgatttaagcagttttcatgtgtacctttacccaagccaagtcaacagtgtctctggggtggcatcctttgcactgaaatttacagtattctgtgagatgtcgcatattttgaagaaaccgtggaagatactggtttatttcaaatgagcagagtatgttgtattaaaatcttatctaatcttgattaaaatttggcaaactcttttctttgctacatcttagtgacaataaatgccaaataggttttggttgagtatagttttgaaaacaaatttggtgaaataaagcaggaaaaaaaatttaagt

SEQ ID NO: 4408 - protein, 99 aa, Homosapiens; identical to SEQ ID NO: 4386

SEQ ID NO: 4409 - DNA, 1074 bp, Homosapiens
aggtgacgctgaggcggcgagggtgagtcggcgccggccgctaccgcacttcgggcgctcgtccctcatttctctgtggtgaatggcgacgggatggagcgcgaggggagcggcggcagcggcgggtcggccgggctcctgcagcagatcctgagcctgaaggttgtgccgcgggtgggcaacgggaccctgtgccccaactctacttccctctgctccttcccagagatgtggtatggtgtattcctgtgggcactggtgtcttctctcttctttcatgtccctgctggattactggccctcttcaccctcagacatcacaaatatggtaggttcatgtctgtaagcatcctgttgatgggcatcgtgggaccaattactgctggaatcttgacaagtgcagctattgctggagtttaccgagcagcagggaaggaaatgataccatttgaagccctcacactgggcactggacagacattttgcgtcttggtggtctcctttttacggattttagctactctatagcatacatccttatgctgagatgttgaacttaaactttatggaatcctccaaaagaatacattatggagtgtagtgttttcttagttcttcaaagggaagcaacttggatgaacaggaacatgaaggacaacacatctcagccttttcttcattttgaagctcctagaattgaagacttatgtggactcctattgttctcaaccaaaacaagtcttttggctttcttttttgtagatatttgatttaagcagttttcatgtgtacctttacccaagccaagtcaacagtgtctctggggtggcatcctttgcactgaaatttacagtattctgtgagatgtcgcatattttgaagaaaccgtggaagatactggtttatttcaaatgagcagagtatgttgtattaaaatcttatctaatcttgattaaaatttggcaaactcttttctttgctacatcttagtgacaataaatgccaaataggttttggttgagtatagttttgaaaacaaatttggtgaaataaagcaggaaaaaaaatttaagt

SEQ ID NO: 4410 - protein, 144 aa, Homosapiens; identical to SEQ ID NO: 622

SEQ ID NO: 4411 - DNA, 1049 bp, Homosapiens
acttggcagcgccgttgggattgggggaagaggaccccggctggaggtgacgctgaggcggcgagggtgagtcggcgccggccgctaccgcacttcgggcgctcgtccctcatttctctgtggtgaatggcgacgggatggagcgcgaggggagcggcggcagcggcgggtcggccgggctcctgcagcagatcctgagcctgaaggttgtgccgcgggtgggcaacgggaccctgtgccccaactctacttccctctgctccttcccagagatgtggtatggtgtattcctgtgggcactggtgtcttctctcttctttcatgtccctgctggattactggccctcttcaccctcagacatcacaaatatggtgcagctattgctggagtttaccgagcagcagggaaggaaatgataccatttgaagccctcacactgggcactggacagacattttgcgtcttggtggtctcctttttacggattttagctactctatagcatacatccttatgctgagatgttgaacttaaactttatggaatcctccaaaagaatacattatggagtgtagtgttttcttagttcttcaaagggaagcaacttggatgaacaggaacatgaaggacaacacatctcagccttttcttcattttgaagctcctagaattgaagacttatgtggactcctattgttctcaaccaaaacaagtcttttggctttcttttttgtagatatttgatttaagcagttttcatgtgtacctttacccaagccaagtcaacagtgtctctggggtggcatcctttgcactgaaatttacagtattctgtgagatgtcgcatattttgaagaaaccgtggaagatactggtttatttcaaatgagcagagtatgttgtattaaaatcttatctaatcttgattaaaatttggcaaactcttttctttgctacatcttagtgacaataaatgccaaataggttttggttgagtatagttttgaaaacaaatttggtgaaataaagcaggaaaaaaaatttaagt

SEQ ID NO: 4412 - protein, 121 aa, Homosapiens; identical to SEQ ID NO: 4388

SEQ ID NO: 4413 - DNA, 1390 bp, Homosapiens
cgctgcggcgccttgtgattggaggaggcaacggtcacttggcagcgccgttgggattgggggaagaggaccccggctggaggtgacgctgaggcggcgagggtgagtcggcgccggccgctaccgcacttcgggcgctcgtccctcatttctctgtggtgaatggcgacgggatggagcgcgaggggagcggcggcagcggcgggtcggccgggctcctgcagcagatcctgagcctgaaggttgtgccgcgggtgggcaacgggaccctgtgccccaactctacttccctctgctccttcccaggtacggcccgccccgcgcctgcgcactgcgcgccccgccgtcgccgctgccgtgctgtgggcgccccgagtctgggcggggtcccgggtgcgcagcctgctggcggcgtgggcgctgtcctccgggaggggggccgtgctgctcgcccggagcccctttccccatcacttcttcggcggtccctgaggcggagccccggagtcccgctgggcgtgagatgcagagagcggccgcagagatgtggtatggtgtattcctgtgggcactggtgtcttctctcttctttcatgtccctgctggattactggccctcttcaccctcagacatcacaaatatggtaggttcatgtctgtaagcatcctgttgatgggcatcgtgggaccaattactgctggaatcttgacaagtgcagctattgctggagtttaccgagcagcagggaaggaaatgataccatttgaagccctcacactgggcactggacagacattttgcgtcttggtggtctcctttttacggattttagctactctatagcatacatccttatgctgagatgttgaacttaaactttatggaatcctccaaaagaatacattatggagtgtagtgttttcttagttcttcaaagggaagcaacttggatgaacaggaacatgaaggacaacacatctcagccttttcttcattttgaagctcctagaattgaagacttatgtggactcctattgttctcaaccaaaacaagtcttttggctttcttttttgtagatatttgatttaagcagttttcatgtgtacctttacccaagccaagtcaacagtgtctctggggtggcatcctttgcactgaaatttacagtattctgtgagatgtcgcatattttgaagaaaccgtggaagatactggtttatttcaaatgagcagagtatgttgtattaaaatcttatctaatcttgattaaaatttggcaaactcttttctttgctacatcttagtgacaataaatgccaaataggttttggttgagtatagttttgaaaacaaatttggtgaaataaagcaggaaaaaaaatttaagt

SEQ ID NO: 4414 - protein, 162 aa, Homosapiens; identical to SEQ ID NO: 4392

SEQ ID NO: 4415 - DNA, 859 bp, Homosapiens
acgctgaggcggcgagggtgagtcggcgccggccgctaccgcacttcgggcgctcgtccctcatttctctgtggtgaatggcgacgggatggagcgcgaggggagcggcggcagcggcgggtcggccgggctcctgcagcagatcctgagcctgaaggttgtgccgcgggtgggcaacgggaccctgtgccccaactctacttccctctgctccttcccagagatgtggtatggtgtattcctgtgggcactggtgtcttctctcttctttcatgtccctgctggattactggccctcttcaccctcagacatcacaaatatggtaggttcatgtctgtaagcatcctgttgatgggcatcgtgggaccaattactgctggaatcttgacaagtatgttagacattaaaataccagtcaaaaatgtttaatatgactagtcaatttcaggacctattctagaaaacatatctgagtaggatgaaggaaagagtgccttttaactgcaagtccagacagggtctccctatgtcaccaaggccggagtgcagtggttgcaatattggctcactgcagcctccacctcttgggctcaagtaatcctcctccatcagcctcccaagaagcttggactacaggggtgtgccaccatgccccgctaattttttttgtattttttgtagagacagggtttcgtcatgttgcccgggtctcgaactcctgagctcaagcaatctgcccaccttggctcccagcactttgggaggcagaggtgggaggcttgctgaagcctaggaaattgagactagcctcagcaacatagcaagaccccatctctacaaataaaaataaaaaattta

SEQ ID NO: 4416 - protein, 113 aa, Homosapiens
MEREGSGGSGGSAGLLQQILSLKVVPRVGNGTLCPNSTSLCSFPEMWYGVFLWALVSSLFFHVPAGLLALFTLRHHKYGRFMSVSILLMGIVGPITAGILTSMLDIKIPVKNV

SEQ ID NO: 4417 - DNA, 831 bp, Homosapiens
acgctgaggcggcgagggtgagtcggcgccggccgctaccgcacttcgggcgctcgtccctcatttctctgtggtgaatggcgacgggatggagcgcgaggggagcggcggcagcggcgggtcggccgggctcctgcagcagatcctgagcctgaaggttgtgccgcgggtgggcaacgggaccctgtgccccaactctacttccctctgctccttcccagagatgtggtatggtgtattcctgtgggcactggtgtcttctctcttctttcatgtccctgctggattactggccctcttcaccctcagacatcacaaatatggtaggttcatgtctgtaagcatcctgttgatgggcatcgtgggaccaattactgctggaatcttgacaagtatgttagacattaaaataccagtcaaaaatgtttaatatgactagtcaatttcaggacctattctagaaaacatatctgagtaggatgaaggaaagagtgccttttaactgcaagtccagacagggtctccctatgtcaccaaggccggagtgcagtggttgcaatattggctcactgcagcctccacctcttgggctcaagtaatcctcctccatcagcctcccaagaagcttggactacaggggtgtgccaccatgccccgctaattttttttgtattttttgtagagacagggtttcgtcatgttgcccgggtctcgaactcctgagctcaagcaatctgcccaccttggcctcccaaaatgctgggattacaggcgtgagccactgtgcctggcccagtttttttaatgtattgattttttttttccaccccc

SEQ ID NO: 4418 - protein, 113 aa, Homosapiens; identical to SEQ ID NO: 4416

SEQ ID NO: 4419 - DNA, 852 bp, Homosapiens
catcttgttagggaggagtagagaggacagttggacctccaggccaggaggtggggtttggcaagagagggtgcagggctgcaggctgatgggtgattagtatcaagatagcccaacttcagcatggagttgcagtgagtcgagatcacgccgctgcactccagcctgggcaacagagtgagactgtctcaaaaaaaagaaaaaaaaagatatgtctctgtaaaaatatatcctcaaggaaatcctcaaatatcttttagggtagggatcttagtctttttactgatatgtcagcatatagaatgagatcaatgtatatttatttgattgatcagtgattaactttttagtgtttttatgactgctattgctactgtaattaattccacaaatttagcagcttaaagccatacagattttattgtcttacagttatgaaggtcagaagtccaaattgggtgtgtgtgggctaaaaccaaggtttagcagggctgtgttccttctggagcttgtaataagaactttgcttgccttttccagcatttagaggccacgtacattccctgatgcttggcctgctcttcttcttcatagccagcggcataacatcttcaaatctctctgactcttatctcctaccttggtcttacaaagaccctgtgattacattagacctaactggaaaatccaagacaatctccttttggaagatccttactttagtcaccacaatgtcccttttcccatgtgggttaatctgttcacaggttttggagatggagatgcgaacacctttgggagcccattctaccacaatgcttaatctcattttccaatatcatattgtattac

SEQ ID NO: 4420 - protein, 94 aa, Homosapiens
MLGLLFFFIASGITSSNLSDSYLLPWSYKDPVITLDLTGKSKTISFWKILTLVTTMSLFPCGLICSQVLEMEMRTPLGAHSTTMLNLIFQYHIV

SEQ ID NO: 4421 - DNA, 2210 bp, Homosapiens
attgtgtgcgctcgggcgggctgcaccgggcagcgccgagggttgccggccggcgcgcggggagtagagggcgcgggccgcagtgccgggttccagagggagctctgcgccgggtccttccctgtggtagccccaggacacccccagcctcagcctcccaaagtgctgagattacaggcatgagccactgtacccagtctccagggccttttaaagaatgtcactaatcccattcttgaggtctccaccttcattatctaatcacctcccaaaggctccacatcccaacaccatcatattgtgggttaagatttcaaccacaagccaggcgtggtggctcatgcctgtaatcccagcattttggaaggctgaggcaggtggatcacttgaggtcaggagtttgagaccagcctggccaacatggtgaaaccccatctctactaaaaataaaaaaaattagccgggtgtggtggtgcacacctgtaattccagctactcaggaggctgaggcaggagaatcccttgaatccaggaggcggacagtgcagtgagccgagataatgccactgcactccagcctggatgacagagcaagactccatctcatgcccagccagcatgcccaacaagcttcatttgcccctgtttaggtcacaaattttattgatggctgcaattaatggcctcttggtatccaagtcctttgttgtatgacccatccattctcccctgactcccaaggtgtcaggacatgcttgactggctcctgaatttgctctctgcgcatgggcagtacagtcaagcctcacagtgaacccaggtcagctttcaggacaaagaaagtggcctggctgactaggcacagtaaagccagggctgggtaggtacatacttgtgctgatcacgtatgtcttatatctctgtgagagtgcagtcccaacaggaaggtttaatcactggggactgcccaatgctgtgacagggcacagagctctgggttgctgtgggggtgactgcattgaccactgttagtggtttgctgtgttgacactctgtgctgtgtgaccatggctcctgccatcaagaagtagagtctgtttctccacctctgaatccaggctggtcctgtgacttgctttgtcctgtagacaagtgtagtgcaacttcctgtgagccagtttgaagcataggccttggaagcaaaactttacctccacctgtcttaggttttcagctggggctctgctgtgatttgattgtgtctcccaaagttggaaccttgatccccagtgttgtgaggtgaggcttgatggaaagtaaattacgccgtgcgggttatgcccttgtgaatgggtagagaacattatttctgggcgcaggcatggtagctcatgtctgtactcccaatgtgctaggattacaggcatgagccactgtacctggcgaaaaacagtttgttaacacaggcagccaacatcactcaggataagcctcaatgaaaagtaacaaagtgatggcttggaacactgtcttacacagcatttttaaaaaatacaataaatttgtagagataggatgaccaaggacaacagttttaggcttccaaaggtggtaaactatgggatggtaaatatccgagaggaagctgatgcaacaggatttgtctgcagcagcctctggtaccacctctgagtcaagggttgtgtccagtgatggagagtttatatcgtgcctttaggcagaaaaggggagggaaacctgaacttttcctgcactttctgcttcttaattgccttcagctgaaaatcattttttatgtgaaaaaggcatagtctgagctgacgcctctgctttcctccacctgaagagaacctgcgtgctgctcctttgcttcggacctccgcctctgcccgggagaaagcccaggccagcctgctggacaagcagagaccatgagaaggagagttcaggggtcccaaaccaggccatcctagaccagccagctccagctgatccgcacgcagccacttcggctaccttctactggccaaagggagtcccagggctcacccagattcagaggtggggaaactgagtccaccacttgagaagagtagctataaagacatatgagcgaggccagctgagcccagcactgcggccaagtcgaagactttaggagcaataaaagtgcttattgtgtttcagtc

SEQ ID NO: 4422 - protein, 69 aa, Homosapiens
MSLIPFLRSPPSLSNHLPKAPHPNTIILWVKISTTSQAWWLMPVIPAFWKAEAGGSLEVRSLRPAWPTW

SEQ ID NO: 4423 - DNA, 3751 bp, Homosapiens
gacgacgtttgggagcctttgctgagtccagggagagaggcgtcccccaccgtgccgctgcagctcgggcagagccgccaagctttggggtgctgaggaacctctaatcatctcccatggatttgtgatcagcgttgcagctctcccagcagccctggacagtggcccccagcagtcagcatgtggctgccgcgcgtctccagcacagcagtgaccgcgctcctcctggcgcagaccttcctcctcctctttctggtttcccggccagggccctcgtccccagcaggcggcgaggcgcgcgtgcatgtgctggtgctgtcctcgtggcgctcgggctcgtccttcgtgggccaactcttcaaccagcaccccgacgtcttctacctaatggagcccgcgtggcacgtgtggaccaccctgtcgcagggcagcgccgcaacgctgcacatggctgtgcgcgacctggtgcgctccgtcttcctgtgcgacatggacgtgtttgatgcctatctgccttggcgccgcaacctgtccgacctcttccagtgggccgtgagccgtgcactgtgctcgccacccgcctgcagtgcctttccccgaggcgccatcagcagcgaggccgtgtgcaagccactgtgcgcgcggcagtccttcaccctggcccgggaggcctgccgctcctacagccacgtggtgctcaaggaggtgcgcttcttcaacctgcaggtgctctacccgctgctcagcgaccccgcgctcaacctacgcatcgtgcacctggtgcgcgacccgcgggccgtgctgcgctcccgggagcagacagccaaggctctggcgcgtgacaacggcatcgtgctgggcaccaacggcacgtgggtggaggccgaccccggcctgcgcgtggtgcgcgaggtgtgccgtagccacgtacgcatcgccgaggccgccacactcaagccgccaccctttctgcgcggccgctaccgcctggtgcgcttcgaggacctggcgcgggagccgctggcagaaatccgtgcgctctacgccttcactgggctcagtctcacgccacagctcgaggcctggatccataacatcacccacggatctggacctggtgcgcgccgcgaagccttcaagacttcgtccaggaatgcgctcaacgtctcccaggcctggcgccatgcgctgccctttgccaagatccgccgcgtgcaggaactgtgcgctggtgcgctgcagctgctgggctaccggcctgtgtactctgaggacgagcagcgcaacctcgcccttgatctggtgctgccacgaggcctgaacggcttcacttgggcatcatccaccgcctcgcacccccgaaattagtggaggccacagttgtagcaggcgctaggcccgggaggagagtgcatggtgcagagggggctggggcgcacggagaagcaggtccctatattgaccaaggagtttgtggtacgacccctccccctccccaagtaggcaaggactgcacgtttctttctctcttgattcttggttttcctttgagtcctctggagctgccttctcatcaggtgcactcttcatggaaagcaactcttgcccctcctcctctgggcacagggtgtgcgttcagatgacttggctcctactcaagggctttcttcccctttaactctctccttctggtgacacatcctgcagcagctgagggggtgccctggcactggctgggagtggagaggcactgtggtgaaatggctccagaggtctgtacatcacatacatatgcacacaggcacacatggcaaaactcggaagtgaaaggacttgtctgaaatcacatggtgagaaggaggatgaagggaggagagagcttttgctctgggtctccagtggataggagaggacctgcctcctgggtgagaagggtcagattttcctattttaattgctttagggaagagcaagcagagtcatgaccagggacacagctgagagatagaggaggctgtgaatgctgagaccagagtttatcatgctggacaagcctggaaggaggcaataagtgggaaaggtaggaggagagaaggctggggagggctgggcagcaagccaggcacagtgagtggcagagcaagagggggaaagcaggatcagtgcctggaaggcaggtgtgcccgtcagcggggagtggaactcatcaggcttgccaagaggttggaagggaaatggctctgggctggaactgtcttcccttggtccttctggtccaggccttggaggaaagcagaggatgatccctgcctgtgagccacacctcctagctctgggggcaaaggggcttagtaaaggaatgctggatgtgtagagggtttagtcccgagctcaggaaatgagagcctataagtgcccagtacatgtttaaaagaagagctcatggaacctctggaaaggacagggaagttgagttagccacataaatgaacccaagtcacattggaacacagagctggtctgggaactgtgttggctgccaacagaacttctgaccctgttacctgtgaaatgaggcagtttccctcacgttgccatcagctaccaggagcgatgctggtggtcactagcttctgatcctcatcctgggtgtggccacagattgggggaacctggattgtggagtcacatcctccctgcaaagcaagcagggcaagggagatctggcattttctgctttacgtggagggagaacaggcacattagccttgaagctgaagctcattttaggttccttccaggtttagaagcttcaaccaaatgaaacttgaatctgtccctcgtgacaattataggaggaaggtatttaaaaccccagatttatgaatgtgtactacatggcttagagaatgtctttgttcttgttcaggtggttataacaaaataccttaagagtgggattacaggcatgagccactgtacctggcgaaaaacagtttgttaacacaggcagccaacatcactcaggataagcctcaatgaaaagtaacaaagtgatggcttggaacactgtcttacacagcatttttaaaaaatacaataaatttgtagagataggatgaccaaggacaacagttttaggcttccaaaggtggtaaactatgggatggtaaatatccgagaggaagctgatgcaacaggatttgtctgcagcagcctctggtaccacctctgagtcaagggttgtgtccagtgatggagagtttatatcgtgcctttaggcagaaaaggggagggaaacctgaacttttcctgcactttctgcttcttaattgccttcagctgaaaatcattttttatgtgaaaaaggcatagtctgagctgacgcctctgctttcctccacctgaagagaacctgcgtgctgctcctttgcttcggacctccgcctctgcccgggagaaagcccaggccagcctgctggacaagcagagaccatgagaaggagagttcaggggtcccaaaccaggccatcctagaccagccagctccagctgatccgcacgcagccacttcggctaccttctactggccaaagggagtcccagggctcacccagattcagaggtggggaaactgagtccaccacttgagaagagtagctataaagacatatgagcgaggccagctgagcccagcactgcggccaagtcgaagactttaggagcaataaaagtgcttattgtgtttcag

SEQ ID NO: 4424 - protein, 395 aa, Homosapiens; identical to SEQ ID NO: 624

SEQ ID NO: 4425 - DNA, 2299 bp, Homosapiens
caccgggcagcgccgagggttgccggccggcgcgcggggagtagagggcgcgggccgcagtgccgggttccagagggagctctgcgccgggtccttccctgtggtagccccaggacacccccagcctcaacatcccattctgggactcctgccctgttcccacattcgttctacctcgagtctccaggagcttccagtggcttggtcaccgccaactctcgtccatgcctcttagagcccctttcccggcctcaccgggtgtcgcttaatagtcttgggaccttaaggagcaagtcagcccctgcggaccctcccagtgaagagaaagagctggctgtgcggtggaatttggaagagacgacgtttgggagcctttgctgagtccagggagagaggcgtcccccaccgtgccgctgcagctcgggcagagccgccaagctttgggttctctagggtgtgtacccaggagtggatctgctgtatcatatggtcactctattcaacctttcgagaaaccaccaaattgtttcttcaggaaatgcaccatctgacatccccattttatgaggatccccacgtctctgtcatctcaccaacacttgtgctgaggaacctctaatcatctcccatggatttgtgatcagcgttgcagctctcccagcagccctggacagtggcccccagcagtcagcatgtggctgccgcgcgtctccagcacagcagtgaccgcgctcctcctggcgcagaccttcctcctcctctttctggtttcccggccagggccctcgtccccagcaggcggcgaggcgcgcgtgcatgtgctggtgctgtcctcgtggcgctcgggctcgtccttcgtgggccaactcttcaaccagcaccccgacgtcttctacctaatggagcccgcgtggcacgtgtggaccaccctgtcgcagggcagcgccgcaacgctgcacatggctgtgcgcgacctggtgcgctccgtcttcctgtgcgacatggacgtgtttgatgcctatctgccttggcgccgcaacctgtccgacctcttccagtgggccgtgagccgtgcactgtgctcgccacccgcctgcagtgcctttccccgaggcgccatcagcagcgaggccgtgtgcaagccactgtgcgcgcggcagtccttcaccctggcccgggaggcctgccgctcctacagccacgtggtgctcaaggaggtgcgcttcttcaacctgcaggtgctctacccgctgctcagcgaccccgcgctcaacctacgcatcgtgcacctggtgcgcgacccgcgggccgtgctgcgctcccgggagcagacagccaaggctctggcgcgtgacaacggcatcgtgctgggcaccaacggcacgtgggtggaggccgaccccggcctgcgcgtggtgcgcgaggtgtgccgtagccacgtacgcatcgccgaggccgccacactcaagccgccaccctttctgcgcggccgctaccgcctggtgcgcttcgaggacctggcgcgggagccgctggcagaaatccgtgcgctctacgccttcactgggctcagtctcacgccacagctcgaggcctggatccataacatcacccacggatctggacctggtgcgcgccgcgaagccttcaagacttcgtccaggaatgcgctcaacgtctcccaggcctggcgccatgcgctgccctttgccaagatccgccgcgtgcaggaactgtgcgctggtgcgctgcagctgctgggctaccggcctgtgtactctgaggacgagcagcgcaacctcgcccttgatctggtgctgccacgaggcctgaacggcttcacttgggcatcatccaccgcctcgcacccccgaaattagtggaggccacagttgtagcaggcgctaggcccgggaggagagtgcatggtgcagagggggctggggcgcacggagaagcaggtccctatattgaccaaggagtttgtggtacgacccctccccctccccaagtaggcaaggactgcacgtttctttctctcttgattcttggttttcctttgagtcctctggagctgccttctcatcaggtgcactcttcatggaaagcaactcttgcccctcctcctctgggcacagggtgtgcgttcagatgacttggctcctactcaagggctttcttcccctttaactctctccttctggtgacacatcctgcagcagctgagggggtgccctggcactggctgggagtggagaggcactgtggtgaaatggctccagaggtctgtacatcacat

SEQ ID NO: 4426 - protein, 395 aa, Homosapiens; identical to SEQ ID NO: 624

SEQ ID NO: 4427 - DNA, 3774 bp, Homosapiens
cccacattcaacaggaggaacccgcgggagaggagccccactcccccagcgccgcagccaccgcagccaccgcagcccgtgcgccccgcgccctcgagcgccatggccaaggaaggcgtggagaaggcggaggagacggagcaaatgatcgagaaggaggcaggcaaggagccggcggagggcggcggcggcgacggctcgcaccgcctcggggacgcccaggagatgcgcgcggtggtgctggctggcttcggggggctcaacaagctgcggctcttcaggaaggccatgcccgagcctcaggacggcgagctcaagatccgcgtcaaagcctgtggattaaacttcattgacttgatggtgcgacaagggaatattgacaaccctcccaagactcccctggtgccaggatttgagtgttctgggattgttgaagctctgggggacagcgtgaaaggatatgagattggagaccgtgtcatggcatttgtcaattacaatgcctgggcagaggtggtctgcacaccagtggagtttgtctacaagatcccggatgacatgagcttctccgaggctgctgcattccccatgaacttcgtcacagcctatgtgatgctgtttgaagttgccaacctccgggaagggatgtctgtgctcgtgcactcagctggtgggggcgtgggtcaagctgtggctcagctgtgttccactgtccccaacgtgactgtctttggaacagcctctactttcaagcatgaagcaatcaaagactctgtgacccacctctttgacagaaatgcagactacgtgcaagaagttaaaagaatctctgctgaaggtgtggacatcgttttggattgcctctgtggggacaacactggaaaaggtctcagtcttctcaaacccctgggaacctacattttatatggctcatccaacatggtaactggagagaccaagagcttcttcagctttgcaaaatcatggtggcaggtggagaaggtgaaccccatcaagctgtatgaggagaacaaagtcatcgcggggttttcccttttaaatctgctcttcaaacaaggccgggcgggcctcattcggggagtggtggaaaaactcatagggctctacaaccagaagaagatcaagcctgtggtggactccttgtgggctctggaggaggtgaaggaggccatgcagcggattcacgaccgagggaacattggcaagttaattctggatgtagaaaagaccccaactccactgatggccaatgacagcacagagaccagtgaagcaggggaagaggaggaggaccacgagggagacagcgagaacaaggagcggatgccctttatccagtaactgaggacccaggtgggagaatgtgaaggatggtttggaagatgaggacccggctgagaaaactcttctgtgccccagtgaacaaatgctgtagtccagtgcgtgtcgtgtttgtctgcagtcagctgagctaaaaagctgttgatcactgttgttttttgaagtgccaatcccatgccatgcagtattatgtccctctcctatctgtgtattacacattcccctctcccctgtatcaaaaccatccatctgtgggttcttcttgacagttctagaacagccttgcaaattaatacaagtcccaggcccaatgcctaagagaccagacgtgggcaaagacaagtttggatggaaaggtgttatcacagagccctgtccagctcctagaattcctcaggccagtgacacttttttgctgctggccacccatgcctctgatgagaacacttgccaatttggccagcagaaagagagtaggccggatgttttcatgagcccacaaatttagaaactctcctagtagtactttttctctctccatttaagagacaactacggtcaaaagtttgagccattctcttctaccccttcagtgtctgaccctttcactggctcttatctgtaaacacagggaggcaggtatggatttttcacagtagacaatgggtcaacagcatgagtttgaggacctgctgtgaagatttctcctccaaaatacatctcatgggcaggattcttcctgctccatatctgtttcaattttaagaaagcaccacatacaagacacattcagaagtcattcctgagcattgctggtgtttgcacacttgccacctgcattaccaattctgtaaatttcaattcctggtggaaagtgaccactttgaccatggatttcccaaagaagagttcctttgcagaccataggtggaaaagtcaatgagcatctccttccttgccaaagcatgtcccaacatgtaacaaactctagggatacaaaaggtttatattcagcatctgatgtcagatgtacagttcctcccctcccatatataaaccccggtgtagaatctgcagcgccctgctcttcggaaaccaaggaacaagccacctgctcacacaccttgttcaacttttcagctcctaaggaaccccacccccatgcaatttgactgtgcttgagaggtgaatacagttaccttcgagaaacagagggagctcctcaccccgtccttccagtccttttggctaaaatgcttaactatcactcacaaacaaatgtggagataccaggagctcatttgattcataccccaactttgtgttctgaaaaacatcagagggattttacattgcccagtttctccaccaacaagccttagggtggacccaaccctttccgcaagtggtaggaacgaatgcatcttagcaattacctgatttccaaagtccttttgtagcaaatgtcacctcattcgtggtctttttacctatcctaagcttatgatgatgagttatgtatgccaaatacttatctgaagagtttctcctcattgtgaatgtgtatgtaaaatatgaagacaagaaagggtgctttcatctgaggaaccaaggggtgagagtatcccaaaggaggacaccagcatcatcttttcttcgtactccaggacccaccaatattccagttctgggtcatttagagagataatggggcgtttattcccctattacctttgctaagtgctatattattggctgtttctcccgtaaccatgctgaaaagggggtcttagggagaactgtcatccaagtggcattcctagtaagttgggtagaaatgacattttccagagctgaaggagtgaagagcccttggccatactagggctctccttcccccggggagtgggaactcagccacattcagaattcacatcgcctttgttatgtccagaggagaggcataaaaaggcactctcccccaccacccctaccaaatctgggtttggtttggttttatttaactagcaaagttaatccagtaatcgcaaattactccagatggttaaagaaaaccctttcagaatacagaacgagaaaactagagtttgaccaataagaccaatttctgccatgaagaaccgggggacgcaagttaattgtttaacgtactctcattttaagcaccttctttcctgtctcttgattgttttttctgaaggaagtgtaaagaatgtctcagtctgccttaaaggaactgtgaaggcttctctgtaatttaagcttgatagaagtgaactgaaacattgtctaatgtctttgtggctttagagcttttgttatattgtgcctataaagcaaattatgtttacataaaaatataaataaagtattcagcatagcaaaacctca

SEQ ID NO: 4428 - protein, 419 aa, Homosapiens; identical to SEQ ID NO: 626

SEQ ID NO: 4429 - DNA, 494 bp, Homosapiens
gtattggaaatcatcttattacacaatccagcatggatttcagaaggcaaatattcaaattacataaacatgcttgttatacactttttcactcctcttcatcttaagggttatggtaactttagcttcaaaccttaagcaagctacatggatttaaaagttaactattaaatcaaatggccttgtatgcaccaataacatgtcatttttttgtttgtttgaggcagagtcttgctgtgttgcctggactagagtgcagtagtgcaatcggggctcactgcagtctcaactttctgggctcaaacaatcctcccacctctacgaaaaatacaaaaaattaaccgggcatggcagcatgtgcctgtagtcccagctacttgggaggctgaggcaggagaatcgctagaacacaggaggtagaggttgcagtgagccgagatcgcaccactgcacattgcactccagcctgagtgacagagtgagactccatctct

SEQ ID NO: 4430 - protein, 54 aa, Homosapiens [sequence omitted]

SEQ ID NO: 4431 - DNA, 1235 bp, Homosapiens
gccggatgttttcatgagcccacaaatttagaaactctcctagtagtactttttctctctccatttaagagacaactacggtcaaaagtttgagccattctcttctaccccttcagtgtctgaccctttcactggctcttatctgtaaacacagggaggcaggtatggatttttcacagtagacaatgggtcaacagcatgagtttgaggacctgctgtgaagatttctcctccaaaatacatctcatgggcaggattcttcctgctccatatctgtttcaattttaagaaagcaccacatacaagacacattcagaagtcattcctgagcattgctggtgtttgcacacttgccacctgcattaccaattctgtaaatttcaattcctggtggaaagtgaccactttgaccatggatttcccaaagaagagttcctttgcagaccataggtggaaaagtcaatgacatcatcttttcttcgtactccaggacccaccaatattccagttctgggtcatttagagagataatggggcgtttattcccctattacctttgctaagtgctatattattggctgtttctcccgtaaccatgctgaaaagggggtcttagggagaactgtcatccaagtggcattcctagtaagttgggtagaaatgacattttccagagctgaaggagtgaagagcccttggccatactagggctctccttcccccggggagtgggaactcagccacattcagaattcacatcgcctttgttatgtccagaggagaggcataaaaaggcactctcccccaccacccctaccaaatctgggtttggtttggttttatttaactagcaaagttaatccagtaatcgcaaattactccagatggttaaagaaaaccctttcagaatacagaacgagaaaactagagtttgaccaataagaccaatttctgccatgaagaaccgggggacgcaagttaattgtttaacgtactctcattttaagcaccttctttcctgtctcttgattgttttttctgaaggaagtgtaaagaatgtctcagtctgccttaaaggaactgtgaaggcttctctgtaatttaagcttgatagaagtgaactgaaacattgtctaatgtctttgtggctttagagcttttgttatattgtgcctataaagcaaattatgtttacataaaaatataaataaagtattcagcatagcaaaacctca

SEQ ID NO: 4432 - protein, 47 aa, Homosapiens
MKNRGTQVNCLTYSHFKHLLSCLLIVFSEGSVKNVSVCLKGTVKASL

SEQ ID NO: 4433 - DNA, 488 bp, Homosapiens
ggccatcagaaggaagcctggacaggtcccttgtttctaagaattcagaggcttgctgactctaactgtgcttgaagcaagatgactgcaggttgcagagtgaaccattgggaaagtttgcctttttggggatgaactgattttccaaccctgatgctggcggaaattgagtgatggaactaaggtcatctggtgctctccttgagctgcttaataaacagtaaagctattcctttctatttaaatgacataaaaaggaattgatttttagtcacctttccaggaagtgcttcctgaacctgaaaacctgcatggagaaattgaagaaattgttcttaaagggtaaaccaaggaaattgtgtccaagatccctgtttctcacaaaaaataagaaaaggaaccaggtaattagatggattgttcgttcaaggcattatgtacacttcttttggttctgaggttaataaagacaaagaagagaaaaaggc

SEQ ID NO: 4434 - protein, 48 aa, Homosapiens
MEKLKKLFLKGKPRKLCPRSLFLTKNKKRNQVIRWIVRSRHYVHFFWF

SEQ ID NO: 4435 - DNA, 1935 bp, Homosapiens
aagatgtagctgtgtagtctccttccatagctgctctaagggggctggcaacatggctcagcaggcttgccccagagccatggcaaagaatggacttgtaatttgcatcctggtgatcaccttactcctggaccagaccaccagccacacatccagattaaaagccaggaagcacagcaaacgtcgagtgagagacaaggatggagatctgaagactcaaattgaaaagctctggacagaagtcaatgccttgaaggaaattcaagccctgcagacagtctgtctccgaggcactaaagttcacaagaaatgctaccttgcttcagaaggtttgaagcatttccatgaggccaatgaagactgcatttccaaaggaggaatcctggttatccccaggaactccgacgaaatcaacgccctccaagactatggtaaaaggagcctgccaggtgtcaatgacttttggctgggcatcaatgacatggtcacggaaggcaagtttgttgacgtcaacggaatcgctatctccttcctcaactgggaccgtgcacagcctaacggtggcaagcgagaaaactgtgtcctgttctcccaatcagctcagggcaagtggagtgatgaggcctgtcgcagcagcaagagatacatatgcgagttcaccatccctcaataggtctttctccaatgtgtcctccaagcaagattcatcataacttataggttcatgatctctaagatcaagtaaaaatcataatttttacttattaaaaaattgcaacacaagatcaatgtccatagcaatatgatagcatcagccaattttgctaacacatttctttgggattttgcccttcctggggtataggggatcagaaatattgatccatgtgcacgcagataaaatggcttctgctaaacagactaaaatctttctctctagtctttctcacttgtacaaacccagtttgttttcaaaaaatcacagtagcaatgcaactcatcactctagaaaagcaagcttaggctacctgaaagattttcccttggaagtttagcgtatgtttgactaacaaaaattccctacatcagagactctaggtgctatataatccaaaaacttttcagcctgttgctcattctgtcccatgctggcaataataccttgtcagcccattacccttattttgaattgctccatctcctggtgggacttgtatcttgtctgccatatcagaacacaaacccctgaagaggttctgatttgattttttttttttcttcatgcctaccctttttttggaagtttccagccgcaatttgaaatgaaatgacaaggtgtatatttgatcaattttcattcccaccattgcattacaacctctaacttaaatgggtaaccctaaggcatatcaaagaagcagattgcatgataaacggaaacagaaaaaaagaacctacatttattttgctttagcatccttactctcaccttttatgagattgagagtggacttacatttccttttttacattttcgtatacttattttttttagccatcattatatgtttaagtctattatgggcaaccaatctttggaagctgaaaactgaatttaaagaatgctatcttggaaaattgcatacgtctgtgcaattttttattctgcctagtgctattctgcttgtttaactagattgtacaaaataacttcattgcttaatatcaaattacaaagtttagacttggagggaaatgggctttttagaagcaaacaattttaaatatattttgttcttcaaataaatagtgtttaaacattgaatgtgttttgtgaacaatatcccactttgcaaactttaactacacatgcttggaattaagttttagctgttttcattgctcaataataaagcctgaattctgatcaataga

SEQ ID NO: 4436 - protein, 206 aa, Homosapiens
MAQQACPRAMAKNGLVICILVITLLLDQTTSHTSRLKARKHSKRRVRDKDGDLKTQIEKLWTEVNALKEIQALQTVCLRGTKVHKKCYLASEGLKHFHEANEDCISKGGILVIPRNSDEINALQDYGKRSLPGVNDFWLGINDMVTEGKFVDVNGIAISFLNWDRAQPNGGKRENCVLFSQSAQGKWSDEACRSSKRYICEFTIPQ

SEQ ID NO: 4437 - DNA, 1716 bp, Homosapiens
agcaacttaagctattatgatcctaattttacagatgaggaaaatgaggcacaaagaagtctgtctccgaggcactaaagttcacaagaaatgctaccttgcttcagaaggtttgaagcatttccatgaggccaatgaagactgcatttccaaaggaggaatcctggttatccccaggaactccgacgaaatcaacgccctccaagactatggtaaaaggagcctgccaggtgtcaatgacttttggctgggcatcaatgacatggtcacggaaggcaagtttgttgacgtcaacggaatcgctatctccttcctcaactgggaccgtgcacagcctaacggtggcaagcgagaaaactgtgtcctgttctcccaatcagctcagggcaagtggagtgatgaggcctgtcgcagcagcaagagatacatatgcgagttcaccatccctcaataggtctttctccaatgtgtcctccaagcaagattcatcataacttataggttcatgatctctaagatcaagtaaaaatcataatttttacttattaaaaaattgcaacacaagatcaatgtccatagcaatatgatagcatcagccaattttgctaacacatttctttgggattttgcccttcctggggtataggggatcagaaatattgatccatgtgcacgcagataaaatggcttctgctaaacagactaaaatctttctctctagtctttctcacttgtacaaacccagtttgttttcaaaaaatcacagtagcaatgcaactcatcactctagaaaagcaagcttaggctacctgaaagattttcccttggaagtttagcgtatgtttgactaacaaaaattccctacatcagagactctaggtgctatataatccaaaaacttttcagcctgttgctcattctgtcccatgctggcaataataccttgtcagcccattacccttattttgaattgctccatctcctggtgggacttgtatcttgtctgccatatcagaacacaaacccctgaagaggttctgatttgattttttttttttcttcatgcctaccctttttttggaagtttccagccgcaatttgaaatgaaatgacaaggtgtatatttgatcaattttcattcccaccattgcattacaacctctaacttaaatgggtaaccctaaggcatatcaaagaagcagattgcatgataaacggaaacagaaaaaaagaacctacatttattttgctttagcatccttactctcaccttttatgagattgagagtggacttacatttccttttttacattttcgtatacttattttttttagccatcattatatgtttaagtctattatgggcaaccaatctttggaagctgaaaactgaatttaaagaatgctatcttggaaaattgcatacgtctgtgcaattttttattctgcctagtgctattctgcttgtttaactagattgtacaaaataacttcattgcttaatatcaaattacaaagtttagacttggagggaaatgggctttttagaagcaaacaattttaaatatattttgttcttcaaataaatagtgtttaaacattgaatgtgttttgtgaacaatatcccactttgcaaactttaactacacatgcttggaattaagttttagctgttttcattgctcaataataaagcctgaattctgatcaataga

SEQ ID NO: 4438 - protein, 145 aa, Homosapiens
MILILQMRKMRHKEVCLRGTKVHKKCYLASEGLKHFHEANEDCISKGGILVIPRNSDEINALQDYGKRSLPGVNDFWLGINDMVTEGKFVDVNGIAISFLNWDRAQPNGGKRENCVLFSQSAQGKWSDEACRSSKRYICEFTIPQ

SEQ ID NO: 4439 - DNA, 1087 bp, Homosapiens
agcagttttaagttctccaggttatattttaacattgtgttcatatgcaaaacaaaggttgtgaatcagcacgaatgctggcaagccctggaaggtttgtgatcacggactttcacgagaccccaaggcaaggagagacagaagcccaggacaacagcatgggcgccgctttttagtcgggcgccgctttttggtcaggcgccacctggactacatttcccatatccaattgccgggctcctgcaggattggccagaacaacgcggaagtgattacgggtcgcccagcaacgggcggagtcctggcccgaaactggatgcgcacgccccttccctgcggcggggaggctgacaaggctccgctctatctctagcgcctcggagcgctctccggctttgctgtctagcccggcggcagcgcgatctcttaggcactttcaccgccttcctctccaggccctgcccctttgacgccggccgtcgcgatattgcggagactggatttcagcttcgtggtcggcggagcggcccctggagggcgcagtgcgcaggcgtgagcggtcgggccccgacgcgcgcgggtctcgtttggagcgggagtgagttcctgagcgagtggacccggcagcgggcgataggggggccaggtgcctccacagtcagccatggcagcgctgcgctacgcggggctggacgacacggacagtgaggacgagctgcctccgggctgggaggagagaaccaccaaggacggctgggtttactacgccaagtaagggggccgcagtggggccgcggacgcacctgggaccctgcacagcccacggacgccacctgcgcggggaggacgcgcactccagcgcagcgcgtgcggtgcaaagtgaaagtaactgttaaggagcttcagggaaaagggtccagggttcccagtaggggccggcccccttggtgggcctcgggtccagcgggggtcacctggtggcttcccggcgcgccctctgctgttcaggatgcagcactgcgcggcgcggcgagggcaaagcggcctcatccccgccaaaaaataaagatgttttaaaaagcgcaca

SEQ ID NO: 4440 - protein, 43 aa, Homosapiens
MQNKGCESARMLASPGRFVITDFHETPRQGETEAQDNSMGAAF

SEQ ID NO: 4441 - DNA, 737 bp, Homosapiens
gcagtgcgcaggcgtgagcggtcgggccccgacgcgcgcgggtctcgtttggagcgggagtgagttcctgagcgagtggacccggcagcgggcgataggggggccaggtgcctccacagtcagccatggcagcgctgcgctacgcggggctggacgacacggacagtgaggacgagctgcctccgggctgggaggagagaaccaccaaggacggctgggtttactacgccaatcacaccgaggagaagactcagtgggaacatccaaaaactggaaaaagaaaacgagtggcaggagatttgccatacggatgggaacaagaaactgatgagaacggacaagtgttttttgttgaccatataaataaaagaaccacctacttggacccaagactggcgtttactgtggatgataatccgaccaagccaaccacccggcaaagatacgacggcagcaccactgccatggaaattctccagggccgggatttcactggcaaagtggttgtggtcactggagctaattcaggaatagggttcgaaaccgccaagtcttttgccctccatggtgcacatgtgatcttggcctgcaggaacatggcaagggcgagtgaagcagtgtcacgcattttagaagaatggaaaacaaaataccaccctccgccagaaaagtgcagaataaaaattttccactagcaaaagaaggaaaaaataaaagatcttgaatagtctcatcaa

SEQ ID NO: 4442 - protein, 189 aa, Homosapiens; identical to SEQ ID NO: 632

SEQ ID NO: 4443 - DNA, 758 bp, Homosapiens
gcagtgcgcaggcgtgagcggtcgggccccgacgcgcgcgggtctcgtttggagcgggagtgagttcctgagcgagtggacccggcagcgggcgataggggggccaggtgcctccacagtcagccatggcagcgctgcgctacgcggggctggacgacacggacagtgaggacgagctgcctccgggctgggaggagagaaccaccaaggacggctgggtttactacgccaatcacaccgaggagaagactcagtgggaacatccaaaaactggaaaaagaaaacgagtggcaggagatttgccatacggatgggaacaagaaactgatgagaacggacaagtgttttttgttgaccatataaataaaagaaccacctacttggacccaagactggcgtttactgtggatgataatccgaccaagccaaccacccggcaaagatacgacggcagcaccactgccatggaaattctccagggccgggatttcactggcaaagtggttgtggtcactggagctaattcaggaatagggttcgaaaccgccaagtcttttgccctccatggtgcacatgtgatcttggcctgcaggaacatggcaagggcgagtgaagcagtgtcacgcattttagaagaatggaaaacaaaataccaccctccgccagaaaagtgcagaataaaaattttccactagcaaaagaaggaaaaaataaaagatcttgaatagtctcatcaattacatcttcttttgtgggta

SEQ ID NO: 4444 - protein, 189 aa, Homosapiens; identical to SEQ ID NO: 632

SEQ ID NO: 4445 - DNA, 1265 bp, Homosapiens
gcagtgcgcaggcgtgagcggtcgggccccgacgcgcgcgggtctcgtttggagcgggagtgagttcctgagcgagtggacccggcagcgggcgataggggggccaggtgcctccacagtcagccatggcagcgctgcgctacgcggggctggacgacacggacagtgaggacgagctgcctccgggctgggaggagagaaccaccaaggacggctgggtttactacgccaatcacaccgaggagaagactcagtgggaacatccaaaaactggaaaaagaaaacgagtggcaggagatttgccatacggatgggaacaagaaactgatgagaacggacaagtgttttttgttgaccatataaataaaagaaccacctacttggacccaagactggcgtttactgtggatgataatccgaccaagccaaccacccggcaaagatacgacggcagcaccactgccatggaaattctccagggccgggatttcactggcaaagtggttgtggtcactggagctaattcaggaatagggttcgaaaccgccaagtcttttgccctccatggtgcacatgtgatcttggcctgcaggaacatggcaagggcgagtgaagcagtgtcacgcattttagaagaatggcataaagccaaggtagaagcaatgaccctggacctcgctctgctccgtagcgtgcagcattttgctgaagcattcaaggccaagaatgtgcctcttcatgtgcttgtgtgcaacgcagcaacttttgctctaccctggagtctcaccaaagatggcctggagaccacctttcaagtgaatcatctggggcacttctaccttgtccagctcctccaggatgttttgtgccgctcagctcctgcccgtgtcattgtggtctcctcagagtcccatcgatttacagatattaacgactccttgggaaaactggacttcagtcgcctctctccaacaaaaaacgactattgggcgatgctggcttataacaggtccaagctctgcaacatcctcttctccaacgagctgcaccgtcgcctctccccacgcggggtcacgtcgaacgcagtgcatcctggaaatatgatgtactccaacattcatcgcagctggtgggtgtacacactgctgtttaccttggcgaggcctttcaccaagtccatggtttcagactgcctggtagaaggaggtcacttctgattgtcagtgactttgagctgagtgctgaaataaaatgataaacaagtc

SEQ ID NO: 4446 - protein, 363 aa, Homosapiens
MAALRYAGLDDTDSEDELPPGWEERTTKDGWVYYANHTEEKTQWEHPKTGKRKRVAGDLPYGWEQETDENGQVFFVDHINKRTTYLDPRLAFTVDDNPTKPTTRQRYDGSTTAMEILQGRDFTGKVVVVTGANSGIGFETAKSFALHGAHVILACRNMARASEAVSRILEEWHKAKVEAMTLDLALLRSVQHFAEAFKAKNVPLHVLVCNAATFALPWSLTKDGLETTFQVNHLGHFYLVQLLQDVLCRSAPARVIVVSSESHRFTDINDSLGKLDFSRLSPTKNDYWAMLAYNRSKLCNILFSNELHRRLSPRGVTSNAVHPGNMMYSNIHRSWWVYTLLFTLARPFTKSMVSDCLVEGGHF

SEQ ID NO: 4447 - DNA, 1679 bp, Homosapiens
gcagtgcgcaggcgtgagcggtcgggccccgacgcgcgcgggtctcgtttggagcgggagtgagttcctgagcgagtggacccggcagcgggcgataggggggccaggtgcctccacagtcagccatggcagcgctgcgctacgcggggctggacgacacggacagtgaggacgagctgcctccgggctgggaggagagaaccaccaaggacggctgggtttactacgccaatcacaccgaggagaagactcagtgggaacatccaaaaactggaaaaagaaaacgagtggcaggagatttgccatacggatgggaacaagaaactgatgagaacggacaagtgttttttgttgaccatataaataaaagaaccacctacttggacccaagactggcgtttactgtggatgataatccgaccaagccaaccacccggcaaagatacgacggcagcaccactgccatggaaattctccagggccgggatttcactggcaaagtggttgtggtcactggagctaattcaggaataggaaaagccagctgccatgttgggaggatactcaagcatacccgtgtagaagaactgagcctcctgccaacagccatcaacagggagctgccaccaccgtgtactgtgctgctgtcccagaactggagggtctgggagggatgtacttcaacaactgctgccgctgcatgccctcaccagaagctcagagcgaagagacggcccggaccctgtgggcgctcagcgagaggctgatccaagaacggcttggcagccagtccggctaagtggagctcagagcggatgggcacacacacccgccctgtgtgtgtcccctcacgcaagtgccagggctgggccccttccaaatgtccctccaacacagatccgcaagagtaaaggaaataagagcagtcacaacagagtgaaaaatcttaagtaccaatgggaagcagggaattcctggggtaaagtatcacttttctggggctgggctaggcataggtctctttgctttctggtggtggcctgtttgaaagtaaaaacctgcttggtgtgtaggttccgtatctccctggagaagcaccagcaattctctttcttttactgttatagaatagcctgaggtcccctcgtcccatccagctaccaccacggccaccactgcagccgggggctggccttctcctacttagggaagaaaaagcaagtgttcactgctccttgctgcattgatccaggagataattgtttcattcatcctgaccaagactgagccagcttagcaactgctggggagacaaatctcagaaccttgtcccagccagtgaggatgacagtgacacccagagggagtagaatacgcagaactaccaggtggcaaagtacttgtcatagactcctttgctaatgctatgcaaaaaattctttagagattataacaaatttttcaaatcattccttagataccttgaaaggcaggaagggaagcgtatatacttaagaatacacaggatattttggggggcagagaataaaacgttagttaatccctttgtctgtcaatcacagtctcagttctcttgctttcacattgtacttaaacctcctgctgtgcctcgcatcctatgcttaataaaagaacatgcttgaatatcatcacctgaa

SEQ ID NO: 4448 - protein, 213 aa, Homosapiens
MAALRYAGLDDTDSEDELPPGWEERTTKDGWVYYANHTEEKTQWEHPKTGKRKRVAGDLPYGWEQETDENGQVFFVDHINKRTTYLDPRLAFTVDDNPTKPTTRQRYDGSTTAMEILQGRDFTGKVVVVTGANSGIGKASCHVGRILKHTRVEELSLLPTAINRELPPPCTVLLSQNWRVWEGCTSTTAAAACPHQKLRAKRRPGPCGRSARG

SEQ ID NO: 4449 - DNA, 834 bp, Homosapiens
ggcgtgagcggtcgggccccgacgcgcgcgggtctcgtttggagcgggagtgagttcctgagcgagtggacccggcagcgggcgataggggggccaggtgcctccacagtcagccatggcagcgctgcgctacgcggggctggacgacacggacagtgaggacgagctgcctccgggctgggaggagagaaccaccaaggacggctgggtttactacgccaatcacaccgaggagaagactcagtgggaacatccaaaaactggaaaaagaaaacgagtggcaggagatttgccatacggatgggaacaagaaactgatgagaacggacaagtgttttttgttgaccatataaataaaagaaccacctacttggacccaagactggcgtttactgtggatgataatccgaccaagccaaccacccggcaaagatacgacggcagcaccactgccatggaaattctccagggccgggatttcactggcaaagtggttgtggtcactggagctaattcaggaatagggttcgaaaccgccaagtcttttgccctccatggtgcacatgtgatcttggcctgcaggaacatggcaagggcgagtgaagcagtgtcacgcattttagaagaatggaactaacatcagaatcatctgaatcatcagaattgtgtattttggaaaaatcggattcatcaaatgaatcttcagccaacaactgttcgagaattatgttaacatcacatgcaggaatgctacattttctcggatttgacattttcagtgatggagaactattatattttgtaaatggaaataccactactaaaaacagaagg

SEQ ID NO: 4450 - protein, 173 aa, Homosapiens
MAALRYAGLDDTDSEDELPPGWEERTTKDGWVYYANHTEEKTQWEHPKTGKRKRVAGDLPYGWEQETDENGQVFFVDHINKRTTYLDPRLAFTVDDNPTKPTTRQRYDGSTTAMEILQGRDFTGKVVVVTGANSGIGFETAKSFALHGAHVILACRNMARASEAVSRILEEWN

SEQ ID NO: 4451 - DNA, 723 bp, Homosapiens
cgctgcgctacgcggggctggacgacacggacagtgaggacgagctgcctccgggctgggaggagagaaccaccaaggacggctgggtttactacgccaagtaagggggccgcagtggggccgcggacgcacctgggaccctgcacagcccacggacgccacctgcgcggggaggacgcgcactccagcgcagcgcgtgcggtgcaaagtgaaatcacaccgaggagaagactcagtgggaacatccaaaaactggaaaaagaaaacgagtggcaggagatttgccatacggatgggaacaagaaactgatgagaacggacaagtgttttttgttgaccatataaataaaagaaccacctacttggacccaagactggcgtttactgtggatgataatccgaccaagccaaccacccggcaaagatacgacggcagcaccactgccatggaaattctccagggccgggatttcactggcaaagtggttgtggtcactggagctaattcaggaatagggttcgaaaccgccaagtcttttgccctccatggtgcacatgtgatcttggcctgcaggaacatggcaagggcgagtgaagcagtgtcacgcattttagaagaatggaaaacaaaataccaccctccgccagaaaagtgcagaataaaaattttccactagcaaaagaaggaaaaaataaaagatcttgaatagtctcatcaattac

SEQ ID NO: 4452 - protein, 76 aa, Homosapiens
MEILQGRDFTGKVVVVTGANSGIGFETAKSFALHGAHVILACRNMARASEAVSRILEEWKTKYHPPPEKCRIKIFH

SEQ ID NO: 4453 - DNA, 409 bp, Homosapiens
gaaggcagccttatccccaggagatgattgaaaatgtaagaactattctgagcctgcaggccatagccaaagaggacctactgttaagttttcaagaccacccagaaagaaatttgaagttgggtttatatccttaatccctcagttagaaaaaaaagaaaagtgaagaaactgcatctccaagatcctgctatatcaacttcagttttttgaagttaaatttgatttttaaatcccttggctgatgagacctgtgtgggtttttttttgttgtttttttgttttgttttgttttgttttatcattgtacctctattttaaaaatagagacttgtggttctttttccaaaagcagtccaacagaaagtgaatggtggtcaatgcataataaaatgagagttaccttttg

SEQ ID NO: 4454 - protein, 37 aa, Homosapiens
MIENVRTILSLQAIAKEDLLLSFQDHPERNLKLGLYP

SEQ ID NO: 4455 - DNA, 423 bp, Homosapiens
cagatctctttgggttttggaataacaaaaaagggactgtacatggatatttccaagctggaaccgaggcactttctagacgaaggcagccttatccccaggagatgattgaaaatgtaagaactattctgagcctgcaggccatagccaaagaggtaccggctgtattttgtccatgggcaggagcttgtgactgctggtctaggtcattccaggtcaaccaggggcctctcccagagtgagaaccactggtgattccccagagtgggaccaagtgaaagcacttggctggatcagagggataggagcctggctgctcctaaaacaagacactacttgcctttgatgttcaagtcatttaagaacgcaattgcttcctactcaatttttcaaaaccaaaataacaaatacgatatgagccat

SEQ ID NO: 4456 - protein, 45 aa, Homosapiens
MIENVRTILSLQAIAKEVPAVFCPWAGACDCWSRSFQVNQGPLPE

SEQ ID NO: 4457 - DNA, 1412 bp, Homosapiens
attcaaggctacacatttactccatgaagtgagcacacttcagacttccagtcttgtgtggcctgtctaccacaccatgagacttcatgtctctcctaaatgaggagaaccaaagctggaaattgtcaccccctgtcagcccacagcactggtttctaaacctactggcctctaccgcttcacttctcactgtaatctctctgaccctaccttccagcttctcttgagaacttgactcttaaattcattggtgagaaaggaaatttttgctccaataaactgggtagctcagccaggagagggtcattagcaaactgtcctttgctaaatgggactaatgggaagaatagtgtctgccaaataaggtggttgaaggattggatgagactgacatttcatttgcatttagtgaatacttgttgaatgactgaatgaatggttgatgtacagaaacatgaacagagagtagagcagaacattggtgaatggtagtagattgcctcagacgcccccctttagaatcacacaagctgtcatctgtgattgcatacctgtagaagtctctatcatttcgtagtctatgtaaatgttgaccaactgagttgttcagtgtacagactgaacaaccatacagggaatccctaatctcctgcactgtgagtcaaagagtcagacaggtctagatgcatttgcttcaggtgaggccaaggcagtctactcttaatggcacattaggctttggacttgaggccgtgtcttttacatttcgcagcaatcagaaggaatggggtcgccccatgaacttcttaaccacatacaggctcgtggcgtggggtcttcatctggctactagattgtttaaagaaggatttttgtgattcttctaggctgacacattgcctgtcatctgttgtttttctaatcttctagtaaacatttggaaagtgaaggtttaggcatgtatgtttctcttatgtaggaaggggaaataaggccatgagattgcatgagttttctttccaagtttgtgcagatctgcacaatgattgaaatatttgcaacctgtagagcagcagggtatttatttggcagcaaacagtattgatggattcggggaatgccatttgacagttacaggctcccgtgaggcggtgcaggctcctccgagccagggatggagctggggattgagtgacacaagactctttgggtatgtctcaaacaatataaatcaccagcaaaatctcactcctacaaggagaacctgcagggagctccgtgggaggcactgctgtttactctcctcattccccactgcaaccacgcaattaaaaccaaggaatggaatctgatgtctaccgcagcggttttttccatctccattccttctgcattgggaggcttaaaaaaaa

SEQ ID NO: 4458 - protein, 64 aa, Homosapiens
MHLLQVRPRQSTLNGTLGFGLEAVSFTFRSNQKEWGRPMNFLTTYRLVAWGLHLATRLFKEGFL

SEQ ID NO: 4459 - DNA, 719 bp, Homosapiens
ggggattctgtgtccctgcatccagaaaagggacagatatagaaagggaggatgcggtctcaccgggccataaacatatatgaatccttcttggaaggaatcagaaatactcgcaggccttctagtttctgggtaaactgatagaacacaggctctttaactggacagtcaaaccacaatgccccctggtggtgaaatcatgcatatacacatgtcatcacagataggaaattctccaataaggtcaacacgacaaggacatctgcagtgatctttctacatgctctgccaacttggcactcatctataactttagaagaggaggcagaacatcagtgatgactgcaaacatatgcttgatttttttaagcaacgggaaaatgaaaaatgaacgggaggagggaacactgctgccttctgaggacagaagtcgtgtttcaagtagtcaggagtgatggggaggtgggacgagaatgaagatttaggggaatctgaacaaaacaaggtggtgtatggggaatgagggcagtcagtaaagccaaatagtaccaggtggaaaaatagcctaaaagaagtacaagtctaatcatccaaaaattctaaagcaaaactaaaactccatagttcagcaaaagacaccctttcaggtgtttagaagactgtggttatccgtttaaagatgttcctctctcaaggaatctctgagaactataaatgtg

SEQ ID NO: 4460 - protein, 30 aa, Homosapiens
MPPGGEIMHIHMSSQIGNSPIRSTRQGHLQ

SEQ ID NO: 4461 - DNA, 707 bp, Homosapiens
cctcatgtatcactgaaacaaccaactgaaaaccattgagaggctcatggtgaaagaagacagacagtgtaatttccctggaaactcaattttgattcagacgtccacagcatctcatttctgcctttaaaaaatttcaagagtgacattttggcatgactggactcacaggtggagaagtgttgtcttttccctgcattgagatagcattgcatggagatccttgtactcttcgaacagaggctgcagatggacacaggatctgctcagggagataagatcacctgctaattctgctttctccatcagagtctgaatgatcagtgatggggaccagagctaggttaggtctctggaaacgccctctgtctgagtccgggagatggatgatatgggtaatgacttgctgctttatcttctctccatctccttacagcagctccaactactgacttttattgtgtggcagctaattgtaggattctatttctgtaaagagaaggcaagagaggaatgcagtgtccaccatccctgcagccctttggcgccttccccctcccattaccttgaagtagagggaaaggggacgacagaagaacccttagaagtaagactttttctgtctctgatgccacggacctttgaaatatttttttgaaaagaaggcctcccttggctgataccttctgactgttagtgaataaagg

SEQ ID NO: 4462 - protein, 40 aa, Homosapiens
MTGLTGGEVLSFPCIEIALHGDPCTLRTEAADGHRICSGR

SEQ ID NO: 4463 - DNA, 386 bp, Homosapiens
gaggctgaagtcatacattcattatttgttaatcccaccctaagtgataggtgtattcatcattctcagtatcagaagaagaaactgaggttcagaatgacccagtaaagatcacaagcccaaccctggtgaagggcgtgattggcagaagcccaatttaagcccccatcatgtcctgacgctttcccaaagctgagctgcctgccagggtctttgctcttccactgccaagaagtaaggttttggttgggcgcggtggctcacgcctgtaatcccagcactttgggaggccgaggtgggtggatcacgaggtcaggagatcgagaccatcctggttaacaccgtaaaaccccgttccgtctcaaaaaaaaaaaaaaaaaaaaaaa

SEQ ID NO: 4464 - protein, 48 aa, Homosapiens
GFGWARWLTPVIPALWEAEVGGSRGQEIETILVNTVKPRSVSKKKKKK

SEQ ID NO: 4465 - DNA, 525 bp, Homosapiens
ggtacccacagcacgctcacctgaaaaccccttagcagggcagtgcagacaggcaagtgttcaggaagatgttctaatgaagagaagaggcacaccgtctatcagattgagagggcctgtgtcagagatgaacagaataccctggtaatatcccaatctcaccaaggctgatctgacagagcccgattacttgcaacaggctgggcccgctacccaggccctgtgaaccggaatggccgagaatcgcgggctttccttcagccagacaactccaacaagcttctctctgtgatcactacaaacacggcttcaccatgttgcccagtctcaaactcctcagctcaagcgatccacccacataagcctccaaaagtgctaggatcacaggcgtgagccatcacaccgtgctgcatgaacttgtaatgtttaactgagttaggccttccaaagcagaggttgggaaactatggctgatgggccaaatgtggcccgtgacctgtttttataaataaagttttactggaa

SEQ ID NO: 4466 - protein, 73 aa, Homosapiens
SDRARLLATGWARYPGPVNRNGRESRAFLQPDNSNKLLSVITTNTASPCCPVSNSSAQAIHPHKPPKVLGSQA

SEQ ID NO: 4467 - DNA, 477 bp, Homosapiens
atgatggccgcgcgaatttccaagaagaggatgttggtcgctgatggcatcttcaaagctgaacggaatcagtttcttactccggagctggctaaagacgcttctctgaagctcagtggcaaagacaatgacaataaaagcacagcctccagagagaagagccttcgatggacctgggtgttaatccaggggccaggcaaaaactgggggatgcagaataggaggttgggctggagagtgtccttttctttctcctacagccccatccttaccctctatagccatcaggtcaggatcattgccagtggaattcaggactgcggttctacccagtaccggggaaccagttgtaaaaacacccacaaatgtgaatgcttcaggcctgaacttgtcaacagccagtggctcattgtagacatagggatgtcgcctgtgtttggggctgagacaccagaacaggtgttctgtgggaactga

SEQ ID NO: 4468 - protein, 158 aa, Homosapiens
MMAARISKKRMLVADGIFKAERNQFLTPELAKDASLKLSGKDNDNKSTASREKSLRWTWVLIQGPGKNWGMQNRRLGWRVSFSFSYSPILTLYSHQVRIIASGIQDCGSTQYRGTSCKNTHKCECFRPELVNSQWLIVDIGMSPVFGAETPEQVFCGN

SEQ ID NO: 4469 - DNA, 677 bp, Homosapiens
gccagaccccttttcagctgggtgctccctggaagatggatcttgccttgtggatgtttttctaccgtgacagaagatagaaaggatgaaatagaaagagtgcaattccaagagagaagaccactggttttgtttgatctagtccctgttgagtccctgtgcaccttcagaaccacatctagcaatagaaggcgctgcacggggaattctggaatgaataaaaacgcttggcagtaccgcatggcgagccagtacccgtgaatgctacttcctccaaagagaattcctgggataacagagaatccattcatggctgccaggaggacttggatatttctcattttccattggccctggagtggaggaacagagccgaaaagtacgtggggggcaggcaaagctgcggtcagaggcagaccctgttggtgttggccgtgtcaaccagctttgctggtttctattatagccctggtgtggcaaaggacactgtgtgactgtgagctcaggtcagcattgcgatcccttcaggcctctggcttgcaggttcctgttcaaccctcttaaatatgcttttgaagcccgtacgttcggtccacgccaactcctgtttatactggtgcgaagtgatgcctgctcagattctgggcgtttcacgggaaggtattaaatgtgttttg

SEQ ID NO: 4470 - protein, 100 aa, Homosapiens
MLLPPKRIPGITENPFMAARRTWIFLIFHWPWSGGTEPKSTWGAGKAAVRGRPCWCWPCQPALLVSIIALVWQRTLCDCELRSALRSLQASGLQVPVQPS

SEQ ID NO: 4471 - DNA, 472 bp, Homosapiens
agaaaaatactggagccacagactttatctgaatgtctgaaatgacctctcttcacattatgggcagcctgaaggccatcggctcccaagttttatgtcctagagctttcaccagtgccaggaaatggaaacttccagttctaaaaaaaatctggggaggggacctttttttcccctgagcttgtgggaaggtgcttaaccacacactaaccttgataaaaatggcacctcccaaggtagccacaagaggagcaggtaggaacagagtttcctggagaagaaggggtcagggatgggtgccaaaaaccaaccccacaggcctgcatgtttacagtttagaccatctctgtgaattgcatccttatgttctgtattttaaaaggccattttcagctcctacttagcttccactcagaaataccattcacatcaggtctctgtgcatgcatgtggttttttaatccacacattg

SEQ ID NO: 4472 - protein, 60 aa, Homosapiens
MAPPKVATRGAGRNRVSWRRRGQGWVPKTNPTGLHVYSLDHLCELHPYVLYFKRPFSAPT

SEQ ID NO: 4473 - DNA, 398 bp, Homosapiens
agtatgctcatgggaacccagctggaaagtgctgtggaaggacaaatggagaaaagtctccagaaattggcctcgtttgaaaggacctcatgcaaagagagatctttggagacatttcagaaaggtttttattcaaacatattcgcagcttgtatgacagtggaatgttttgaaatgagcttgattctgtttacccatccttcttaatccaacaactctgctggtctctctgctgacacaagatcgttcgcaggttatagaaggatttaacacgtcagccaatgcaggaagtagtcctctgaaatacatgtccacagaacacgccgtgctttccagaagacgcaacagacagaaactttccaaagggaattacctgggatcatttctcatcctctctc

SEQ ID NO: 4474 - protein, 67 aa, Homosapiens
MLMGTQLESAVEGQMEKSLQKLASFERTSCKERSLETFQKGFYSNIFAACMTVECFEMSLILFTHPS

SEQ ID NO: 4475 - DNA, 1186 bp, Homosapiens
gtaccccaagctggtttgggtttataccagtttgaaccgagggaccttcagctgaggaacatgtgctctgtgtgctggaagctcctggaggccccagggttatctctgctcacttagcaacagggagctgccaccaccgtgtactgtgctgctgtcccagaactggagggtctgggagggatgtacttcaacaactgctgccgctgcatgccctcaccagaagctcagagcgaagagacggcccggaccctgtgggcgctcagcgagaggctgatccaagaacggcttggcagccagtccggctaagtggagctcagagcggatgggcacacacacccgccctgtgtgtgtcccctcacgcaagtgccagggctgggccccttccaaatgtccctccaacacagatccgcaagagtaaaggaaataagagcagtcacaacagagtgaaaaatcttaagtaccaatgggaagcagggaattcctggggtaaagtatcacttttctggggctgggctaggcataggtctctttgctttctggtggtggcctgtttgaaagtaaaaacctgcttggtgtgtaggttccgtatctccctggagaagcaccagcaattctctttcttttactgttatagaatagcctgaggtcccctcgtcccatccagctaccaccacggccaccactgcagccgggggctggccttctcctacttagggaagaaaaagcaagtgttcactgctccttgctgcattgatccaggagataattgtttcattcatcctgaccaagactgagccagcttagcaactgctggggagacaaatctcagaaccttgtcccagccagtgaggatgacagtgacacccagagggagtagaatacgcagaactaccaggtggcaaagtacttgtcatagactcctttgctaatgctatgcaaaaaattctttagagattataacaaatttttcaaatcattccttagataccttgaaaggcaggaagggaagcgtatatacttaagaatacacaggatattttggggggcagagaataaaacgttagttaatccctttgtctgtcaatcacagtctcagttctcttgctttcacattgtacttaaacctcctgctgtgcctcgcatcctatgcttaataaaagaacatgcttgaatatcatcacctgaa

SEQ ID NO: 4476 - protein, 80 aa, Homosapiens
MLCKKFFRDYNKFFKSFLRYLERQEGKRIYLRIHRIFWGAENKTLVNPFVCQSQSQFSCFHIVLKPPAVPRILCLIKEHA

SEQ ID NO: 4477 - DNA, 2370 bp, Homosapiens
catgcagcttttaaatgacaggcacgtgctcacaggcttctgttcagagagaacctgtgagctgtcctgtggcctttcctgtttacggtgcagccatcccaaatatgatgcccccaaatccgagtctggctagaaggaagtgtcatacaaaggccatgccattctccctgacaaaagacatgagtttcttgcaagagcactaagaagttttaagaggtggactcgaagagaggagaatgaattggaaagccagcaagaatgtggctcttactcctctgtgaaatatttgcaggaacgagcctggagaccagcaggttcaggatggaaagctggaaagaattctttcctaaaacttaagttttagagaaaaataggcagccagtcccaaccacccaaaggcgtccaaagccatgtttgttctgggaaggccaaggcatgggaggatgttaacttgggctatcagcaggattgaagggcagggtgaccttggtacgctctcagggcctgtgtttccaagtcgacaaactgttctgagcttttccatgaaacgagtgaagcccttttcatacctccttcgtgttccagaattcttgccatcgatgttccaaaggatctgtgatagatttatgtctagccttaaatgggacgagttgtaacattcagaattattttatctttctgagacctgctattattgtgagaccctagacatgctttgctggggttagggtgagggtactcctaacgagggaaggaaaaagaaacggcttcaaggcaatccatgtgggtcattacatgcacacttgttccatcttccatttgtgcctgcccaaagcgttctagaactgaccggacctgagaggctgtctcattagaactaagagaaggtattgttgatgatgtcttatatccatggaagaattccctgggcattccctctgatgctgcctgggatacctacattgctcaaagtacagtttctttatgaatagggatgaaacatcgcattggggtatctattcttccatggttggtttgaaatagccaagcagaagtgccatagaaatttgccaacaaaataagcatctaactgatagtgtcgtccttctacatggaacaaatctgatggcatgtcactgaaattttccaactgggccaccttgatgcccgtgctaaaggactgctgggtgtttataagatataaaagaagatatttagtgtgtgtttatttgaaacattttacatttttactctacttctttaacctctgttatggttatagctagctcgtgtactgcgtataaatgtatgcatctgtattcgccatctacaccaaaataaacctttgaaattattgccaggcagaattaatgagctcagttctaacagcgcaaagaatatcttcatactacaggtaaaacaaacagcttctcccttcccttcttctgcacagaatggctctacgaagtctgcctgcaaaattacgtcttttagaaaaccaagtagctggctgttttgtgagcagggaggatttcaggacgaaccacaaacaagctgtttgtttagattttaaggttgacagttcatttacacgtatgccccataagtattctataacatagtcctgaaaaagcactgaagaaaaaaaaaaaaaaaaacacaaggtctccgctggggccacatcatgggaaggaattaactcttaactctgccttccagaaacaaattaagaggatgtactttgcaataattcagatctcacaggtaggcccccaatgtccagccccgctatttcaaatcgggcatgtctgagttaggtgtgtggatttccatacagagctcactggaacagaccatttctcaggttccaagacgctggccttgttaatatttcatttagaacatactgtggagagtgtctcatttatattacttccataattaatggtgatagcttaggcactgcctttacacagagagatctcttcacagtggtcgatgggtaatgagaaacaatagatatttcattcaccagcagcgtgttgctagttagtaggaaatgatcgtgtgtgctgttgctttaattgcccgggtaaataattctgcctcggtgttagtgagcattttaaagcacttgatgccaatagactagaaacaaacaaaaattaaccttgattatgcaacaccttagcatagaaagttacaaaggtatgtcttttttaaagtttgcatttatgcatgctgctattctaggcaatttcaggtacttttataatatgaaggcatgtacttgaactcgtttgttaacagaggggaaaaaactctctcaaactctttaaagctgaatagaaattaaagatttcttcctag

SEQ ID NO: 4478 - protein, 38 aa, Homosapiens
MQHLSIESYKGMSFLKFAFMHAAILGNFRYFYNMKACT

SEQ ID NO: 4479 - DNA, 1251 bp, Homosapiens
cgtttttccaggatagtcacattatactttttacagtcatgtgctttcagcccagtaccctttgctatgccaagatccagctgaaactgaaccaggtgggggaggcctgctaatgcccaggcagtcgaaatgacgccatctcatcactccttttcttaaaatttttttttgtctttcttcttggatttccagcaacagggagctgccaccaccgtgtactgtgctgctgtcccagaactggagggtctgggagggatgtacttcaacaactgctgccgctgcatgccctcaccagaagctcagagcgaagagacggcccggaccctgtgggcgctcagcgagaggctgatccaagaacggcttggcagccagtccggctaagtggagctcagagcggatgggcacacacacccgccctgtgtgtgtcccctcacgcaagtgccagggctgggccccttccaaatgtccctccaacacagatccgcaagagtaaaggaaataagagcagtcacaacagagtgaaaaatcttaagtaccaatgggaagcagggaattcctggggtaaagtatcacttttctggggctgggctaggcataggtctctttgctttctggtggtggcctgtttgaaagtaaaaacctgcttggtgtgtaggttccgtatctccctggagaagcaccagcaattctctttcttttactgttatagaatagcctgaggtcccctcgtcccatccagctaccaccacggccaccactgcagccgggggctggccttctcctacttagggaagaaaaagcaagtgttcactgctccttgctgcattgatccaggagataattgtttcattcatcctgaccaagactgagccagcttagcaactgctggggagacaaatctcagaaccttgtcccagccagtgaggatgacagtgacacccagagggagtagaatacgcagaactaccaggtggcaaagtacttgtcatagactcctttgctaatgctatgcaaaaaattctttagagattataacaaatttttcaaatcattccttagataccttgaaaggcaggaagggaagcgtatatacttaagaatacacaggatattttggggggcagagaataaaacgttagttaatccctttgtctgtcaatcacagtctcagttctcttgctttcacattgtacttaaacctcctgctgtgcctcgcatcctatgcttaataaaagaacatgcttgaatatc

SEQ ID NO: 4480 - protein, 80 aa, Homosapiens; identical to SEQ ID NO: 4476

SEQ ID NO: 4481 - DNA, 1140 bp, Homosapiens
cgtttttccaggatagtcacattatactttttacagtcatgtgctttcagcccagtaccctttgctatgccaagatccagctgaaactgaaccaggtgggggaggcctgctaatgcccaggcagtcgaaatgacgccatctcatcactccttttcttaaaatttttttttgtctttcttcttggatttccagcaacagggagctgccaccaccgtgtactgtgctgctgtcccagaactggagggtctgggagggatgtacttcaacaactgctgccgctgcatgccctcaccagaagctcagagcgaagagacggcccggaccctgtgggcgctcagcgagaggctgatccaagaacggcttggcagccagtccggctaagtggagctcagagcggatgggcacacacacccgccctgtgtgtgtcccctcacgcaagtgccagggctgggccccttccaaatgtccctccaacacagatccgcaagagtaaaggaaataagagcagtcacaacagagtgaaaaatcttaagtaccaatgggaagcagggaattcctggggtaaagtactttcttttactgttatagaatagcctgaggtcccctcgtcccatccagctaccaccacggccaccactgcagccgggggctggccttctcctacttagggaagaaaaagcaagtgttcactgctccttgctgcattgatccaggagataattgtttcattcatcctgaccaagactgagccagcttagcaactgctggggagacaaatctcagaaccttgtcccagccagtgaggatgacagtgacacccagagggagtagaatacgcagaactaccaggtggcaaagtacttgtcatagactcctttgctaatgctatgcaaaaaattctttagagattataacaaatttttcaaatcattccttagataccttgaaaggcaggaagggaagcgtatatacttaagaatacacaggatattttggggggcagagaataaaacgttagttaatccctttgtctgtcaatcacagtctcagttctcttgctttcacattgtacttaaacctcctgctgtgcctcgcatcctatgcttaataaaagaacatgcttgaatatcatcacctgaa

SEQ ID NO: 4482 - protein, 80 aa, Homosapiens; identical to SEQ ID NO: 4476

SEQ ID NO: 4483 - DNA, 663 bp, Homosapiens
tccagcaacagggagctgccaccaccgtgtactgtgctgctgtcccagaactggagggtctgggagggatgtacttcaacaactgctgccgctgcatgccctcaccagaagctcagagcgaagagacggcccggaccctgtgggcgctcagcgagaggctgatccaagaacggcttggcagccagtccggctaagtggagctcagagcggatgggcacacacacccgccctgtgtgtgtcccctcacgcaagtgccagggctgggccccttccaaatgtccctccaacacagatccgcaagagtaaaggaaataagagcagtcacaacagagtgaaaaatcttaatgacacccagagggagtagaatacgcagaactaccaggtggcaaagtacttgtcatagactcctttgctaatgctatgcaaaaaattctttagagattataacaaatttttcaaatcattccttagataccttgaaaggcaggaagggaagcgtatatacttaagaatacacaggatattttggggggcagagaataaaacgttagttaatccctttgtctgtcaatcacagtctcagttctcttgctttcacattgtacttaaacctcctgctgtgcctcgcatcctatgcttaataaaagaacatgcttgaatatc

SEQ ID NO: 4484 - protein, 80 aa, Homosapiens; identical to SEQ ID NO: 4476

SEQ ID NO: 4485 - DNA, 333 bp, Homosapiens
cggacaacggaaaggcagctctatctgaaggtgaaactgctctagctaacagggaaagctctttaaaagaccatcaaagagacaccctgcacaatgcctgctttccggaggagcctcgcgcccacaaggccatcccccaaatccaaaatatgctggcatgctaatcgcgtgagacaacttggcccacggacagccacaaagcacaaaaacaaaacacaaactcactcagagaagaaacaagaatcgtgttttcctggcatctacgagaagcgctttattagaagcgctttatttttcctctagatttcttttctaaaaaatgaaaaacaaaaa

SEQ ID NO: 4486 - protein, 69 aa, Homosapiens
MPAFRRSLAPTRPSPKSKICWHANRVRQLGPRTATKHKNKTQTHSEKKQESCFPGIYEKRFIRSALFFL

SEQ ID NO: 4487 - DNA, 2592 bp, Homosapiens
cttcgtaacttcatggcaacatgacctacagttactcatttttcaggcctgagttgatcgttaatcatcttaattatgttcattctgaagccaacaggagaaccaagaccaaaactttattgtctctgctttcatttcttgatgaaacctctggactaagcacacatcttccttgtttatctctctcaaaggagtgtggagtgcttcatctggacatccacgggaagaaggaagacatgagggaatgctggaagaggagacaggccccagatttgggcaggaagtaaacagttttcaggctgaggccaatctgagcaggaacattccaatatttcttcagctacgttgtcccagcacttcactggttaaccttttatgtccaccatttgtggatttcacagctacttgtcaatggtgaatattgatcatcatcattatctactgagctgctaccatatcccagctactccttgcatgttgttcattattttctcaacactcagcatatttgcaatatgttatgtaatatcacagacaaggaaactgaacgcagaaatgttttatttcttgccaaacatcacatgaggatgaacaatgaaaccgatttgaaaccaggattgtctgattccaacatctctgggtcctttttcactctgatatgctgcaattaaaaagccatttctaagactgtacgttccaagattgtttctatagttggttgtgagagaagtttctctgaacttgcagagcacgggaaaccaggaggaggaggctcagggtgctctccacacgtgtgaaaccggctgtgggtgttgctttcctgtgactgccatttgccactgatgatcttctcttcctctggaagagtaagagggggaaggacacagtttcagtgcttcccatttataattaattaattaattaagggcaggtgcaggggctcacacttgtaaccccagcactttaggagattgagcaaggaggatcccctgagcctgggagtttgagatcagcctgggaagcagagtgagaccatgacttaaataaaaatttttttgtgttttgttctaatttttacttttttgagacagggtctcgctctgttgcccaggctggagtgcagtagcgtgatctcagctcactgcaacctctgcctctgggttcaaacaattctcatgcctcagcctcccaagtagctgggattacaggtgcctgccaccatgcccaactaatttttttgtacttttagtagagacgggttttcaccatgttggttggccaggctggtctcgaactcctgacctcaagtgatccgcccacctcagcctcccaaagtgctgggattacaggcatgagccaccacgcccgaccaaaaaaaaatttttttttttcaattagccagacattgtggcatgtgcctgtagtcgcagctaccatgggggctgaggtgggaggatagcttgagcccaggagtttgaaaccagcctgggcagcaaagtgagaccctgcctcaaaaataaaaaataaaaaaaaagctatttcttacagatattcattgagtggaaagcaatttaattttacgtataataagttatttcaaaaagaattgtagttatgtgtggcaatttttcataaatacctgatacaaatcaagatctaccatggtaagtgtgctccagagatacccttcttgaccaaaacaaagcagggcagggattgggaggccttttgggctgggctccaggacacaatgactagaagatgatgcaaagtgcatgacagagtagagagctacacagtttacacatattagactctgcacatattagagtctacacatattagactctgcaaaagtagttcttaaatgttagctcacatgcaccccagtcacgttactgagcagattcctgggctccagtcctgggtgattcttgcaggtggtccattgaccagattaggagaatcatcatccaaggtctcaaagccaaatttaggacgcagagagaaagaatcctaagtggttgaatgggaaactgattctcctcttgagcacaccttagattcaaataattgattggagaagatcattccatacaaaaatcttctgacctgcagagtttctacaaaaagtcttgagaaagaaaaagaaaaacatatatttttggaaaagattgaatttaattataattttgcaaattatactgtgggaaaggtcaacaaaaacaagcgtattgcggatgatcttataaaaagaaccttttgtaaagtaaacaattaccttctgatttgtctactctgaacccttgatgtttatttaaattggatgttctcatagcaggacacacctgatacctggcttgtctaaacacttagaaagtcaaattgtctagttatcaaagcccaggcttattttctaaataagtatggatggtctttcaggagtcatttcacagtgatgtgcagagagaaaaacaatacaaacaaacaaacaaacaaacaaaaaacaaatcattgttcctaagtgtgttttccagcctatgtctaactttctagcagataatggcaataaaaatgtttgggtccaacatt

SEQ ID NO: 4488 - protein, 88 aa, Homosapiens
MTYSYSFFRPELIVNHLNYVHSEANRRTKTKTLLSLLSFLDETSGLSTHLPCLSLSKECGVLHLDIHGKKEDMRECWKRRQAPDLGRK

SEQ ID NO: 4489 - DNA, 767 bp, Homosapiens
caagtaggaaagatttgttggagctctcactgccttctataaaacctgctgtttggtacccatggaataccaaattctcacaactgctaggccactcgctagtgctgtatatccatacaattctgtcccagaccctgccttgtatgcctagcaacatgtgaagatttctatttctaaatccagtcattccagttgtacttattactgtcattatgcagtctcattaaatattattaaaagcaattattatggatatgaagaacaaaagatctacttcctctacaaaaaccaaatcaaatgcattgaaaagagacaataaagtcaggtcaccttaaaaataaatactgtcatcttaagtttgaccaagacaaccataaaagattgaggaaggaaatcagatcatttaaaaatgggaagaatagtggtcttagattgctttgtaagtttctgtaagttcctccttcacctaagaaactgaagcttcacatggccaatgatgctgtgtaggtgtcacttgtctgtgagagccaatgaagaacattaatcagaagaaccaaactcaagaacaaggtcatttcctgcttcacaagggccatctttactttgaaagatacagaaagactgtgtatatccttgcttgtgatcttcccaatcagtagcatctgtttctaggtcagatggcatacaagttcctcctctgctaagagttactgcttttgtgcctccccaaaaagatataataaaaataagattgaatatggtctttt

SEQ ID NO: 4490 - protein, 42 aa, Homosapiens
MKNINQKNQTQEQGHFLLHKGHLYFERYRKTVYILACDLPNQ

SEQ ID NO: 4491 - DNA, 1392 bp, Homosapiens
aatgaattatacccagccatgaaacaatgccaactgtctcttccctaaggaagagtacaagtaccctaaaattgaaaggtggtccctacactgaaaacgcacatagtcttttgtactggaaggaaatattttctggacttaagtagttgcctaaatttaagattcctacactttatttctgccattgatgcttttcctaaacccttatactatctttttattatctgagccttttcctaatgcagctcataggtgctagctagagctgctgctcagtattgaagactttacaaggagattagaaatctttggaaaacatatgtgatgaaattgagctatatgatttatcagagatctgattccaaagagcacagaatactgttctcagaccatgaaaccagacaacacatgtattggtttaaactcgataatgacaggaaaattccaaactagagcagtaaattcaaatggtaagatgaatcctagaaggcctctgattgcagcatgttgacaccaacctcacgttacgaacaattcacagagaatttgcctttgtggcaactgaagatggaagtctggggggcacagacaaccttatcaaacaatataaaagccaatataaattctcataagcactatagaatttgcaaattcagaacattttatacctaaaagtaattctgtctttcctaaagtgtttttaacatgaaaattagtaggaagatgtggttactatttggaaagtgtaatgtaacaaaactctcttttgttaccacaaattttgtgagtttagtactctacagattgccccataagagcagtagcttttgaaactcataattctctgaaataaatgaaagacatttaattcaaggatcaaaaattgtggccatctttgcaaatgactacctatagcctgtgaaaatacatttcaaaaaatgttatgtgcaatgaacactaaatttaagagcagttacagtgtgactcactcatgtttaaaaaaaatcgaagagctaaaaaatacgtctaatttatgtaacccattggaatgtatttctaggttctcttcaggattaattaaataaacatgcaatttatgaaaacatataaacaattatttatcacttttatgacccaaatcacaataaaattgtcatttaggataaactggggagaatagactgaacatatggttatattcacagttatttattaacttaaatgttattccaacattagagctaatgttaaaaagatttaaactgtaacgtctaatatttggaataatatattaaagtattagcactgtggttgattttcttgaattatgttgcatcttgtactactaagcttgtgaaaataaacatttggatgttttaaaaggtaaacatt

SEQ ID NO: 4492 - protein, 39 aa, Homosapiens
MPTVSSLRKSTSTLKLKGGPYTENAHSLLYWKEIFSGLK

SEQ ID NO: 4493 - DNA, 4853 bp, Homosapiens
tttagctattttcaaactaggactccaagcttcttgcaaactctttgctaaataatgccttggtggcatgaggcacatccctaaaatagctaatttactcctagggaatttttgatgattcttaatagtgtgaaaactgattctggcagtatttaggttcatggaaatcttaccgctggtcatggtctcctggttgagttgataatcacatttcaattggtgtttactatctttgccagctgtgattccaaacggactgatgtcactggctcaatagctttagcaattggattttctgttgcaattggacatttatttgcaatcaattatactggtgccagcatgaatcccgcccgatcctttggacctgcagttatcatgggaaattgggaaaaccattggatatattgggttgggcccatcataggagctgtcctcgctggtggcctttatgagtatgtcttctgtccagatgttgaattcaaacgtcgttttaaagaagccttcagcaaagctgcccagcaaacaaaaggaagctacatggaggtggaggacaacaggagtcaggtagagacggatgacctgattctaaaacctggagtggtgcatgtgattgacgttgaccggggagaggagaagaaggggaaagaccaatctggagaggtattgtcttcagtatgactagaagatcgcactgaaagcagacaagactccttagaactgtcctcagatttccttccacccattaaggaaacagatttgttataaattagaaatgtgcaggtttgttgtttcatgtcatattactcagtctaaacaataaatatttcataatttacaaaggaggaacggaagaaacctattgtgaattccaaatctaaaaaaagaaatatttttaaaatgttcttaagcaaatatatacctattttatctagttacctttcattaacaaccaattttaaccgtgtgtcaagatttggttaagtcttgcctgacagaactcaaagacacgtctatcagcttattccttctctactggaatattggtatagtcaattcttatttgaatatttattctattaaactgagtttaacaatggcaaaatacagtatgtcacagtcatgcacattcaagagagaaaatataacaagttcttttatgagcaatcccttatgcatagactaccttggcaaaagagcattagcaagtgtcactgctcatcagttacttccttccatttatatcacaaatacccaagtttcaattctaacttcatttcatggtatttcttcctcctcaatgcccaaggtaatgtgggactaaagcccagaaatttgaaaagaatattcagaaatccttcccaaatcataagggcacctattgagattcaagacaagcagactcgtaaaatcttgtagaggcagaggcaaagttatcatcatacaaaaatcacaaacaaaaaggagatctgtattcgggtatcaaacggttgatctgttttcagtgcacaccctcaaatgcaccacaccagttttacgatctaagcttttaacccctttaccactttgcttatttttaaaaaatttattggcaaaactggggattttgtttgtaactttggttatctatatttaaacattagctgagacatatttttgataacaagaacttagctagttgagtcctggctttttgttgattattaagctgtgttcactctagaaggtgtaaaggccctgtcccaatctctgctctctcacttctcgtgacatttgttgataatctttactgcaagtgtaatgatatttgagtgaattaaaatgcatgacagacaaggtacaacatggttgcagaataaaagggtgaggacatcagatcactctgtattcaaagcttactagacgaacaatctttcatttctggatatattgtagctaacccaacacatttttaaactatttttgttactgactcacttacttgtcaaaataattggtttttctgtcctgctttgccttttgtcactagaatgttctccagaaaccccagtttctgtcatcttaactgtctagtctagccgttaacttagacaaagaagtgcaaatgtcaatttcactaaacaaaagctattagaagtaaagcagaaacctatcactgcaaggagtgacttgtaaataactgatgatcaagggctgtcttctctcaagcatggttccaactctgtgtcactttttagcgttaatggcagttgtgtgtctgtggcagtgagataatggaccactattaaacctgattctcttcggtgctaggaaagagtgatgtgtgagattcccagagagtcgtcacaccagtgttatgcctgggagtgccactggcataccgcaggtgcctaaatcccaggcccctttctcagggggcgtggccacaccacacactgcgccagtgacacatagttacttcctggctgggacggcacctatagaaactagggtacaaatctcccaaagatggtttgcaccgtcatttcaaatgtttgcacaatataccacttagaggcttaaaatcagggtggttcagttcaaaaggtaatatcaaccgtcagcaaacatgtcagtttaaaaataagttcggttaacaaggaagtgttaagcagattttttgaatacacttacaatatactggcttataatcatttttattctgccatatggtttatttcatatacactcacttttacactcacttccaattatagcattcaataagttacggttaaagaaaagtgaatggtgtttttgtaatttgttttctagtagctagcagagagcctggcacatagtatgtattcaaaacaagtgtgttaattaataaaaatatataaatctcatttgagatttaagaatataaataattttcttttaatctttattttgctcaatatttaataggaagtatgatttcaaggactactaaaggaaggcaatatacatgtgaaaaccataaaatacattttttgcattctactatttttaggggcatgaaatgaatgaaagctttagcacttttttgcccctacatatgagacaacatattttgtatttcactcaaggctctgccagtaaaaagtaatgaaattgtacctttctaatgacatctatgcagcaggggtctatcgccttgtggatggcaccaaattatccaagtgtattaggagactggggcttttttctttaatcccttcttattaatgaagtgcatagtgctgctcccaggagaccactgctgacagatacacagagaagagatcagagaggaaaaactgggaagacataaatgaattatacccagccatgaaacaatgccaactgtctcttccctaaggaagagtacaagtaccctaaaattgaaaggtggtccctacactgaaaacgcacatagtttgtcaaaagtgtacaaaagggaaagagtcttattttaagctttcaggctttcttaaaaacttggggaccagaatttcaatgtatgtttccattgttgaagataacattttcttcaaagagccttaaccttttgtactggaaggaaatattttctggacttaagtagttgcctaaatttaagattcctacactttatttctgccattgatgcttttcctaaacccttatactatctttttattatctgagccttttcctaatgcagctcataggtgctagctagagctgctgctcagtattgaagactttacaaggagattagaaatctttggaaaacatatgtgatgaaattgagctatatgatttatcagagatctgattccaaagagcacagaatactgttctcagaccatgaaaccagacaacacatgtattggtttaaactcgataatgacaggaaaattccaaactagagcagtaaattcaaatggtaagatgaatcctagaaggcctctgattgcagcatgttgacaccaacctcacgttacgaacaattcacagagaatttgcctttgtggcaactgaagatggaagtctggggggcacagacaaccttatcaaacaatataaaagccaatataaattctcataagcactatagaatttgcaaattcagaacattttatacctaaaagtaattctgtctttcctaaagtgtttttaacatgaaaattagtaggaagatgtggttactatttggaaagtgtaatgtaacaaaactctcttttgttaccacaaattttgtgagtttagtactctacagattgccccataagagcagtagcttttgaaactcataattctctgaaataaatgaaagacatttaattcaaggatcaaaaattgtggccatctttgcaaatgactacctatagcctgtgaaaatacatttcaaaaaatgttatgtgcaatgaacactaaatttaagagcagttacagtgtgactcactcatgtttaaaaaaaatcgaagagctaaaaaatacgtctaatttatgtaacccattggaatgtatttctaggttctcttcaggattaattaaataaacatgcaatttatgaaaacatataaacaattatttatcacttttatgacccaaatcacaataaaattgtcatttaggataaactggggagaatagactgaacatatggttatattcacagttatttattaacttaaatgttattccaacattagagctaatgttaaaaagatttaaactgtaacgtctaatatttggaataatatattaaagtattagcactgtggttgattttcttgaattatgttgcatcttgtactactaagcttgtgaaaataaacatttggatgttttaaaaggtaaacatt

SEQ ID NO: 4494 - protein, 112 aa, Homosapiens
MNPARSFGPAVIMGNWENHWIYWVGPIIGAVLAGGLYEYVFCPDVEFKRRFKEAFSKAAQQTKGSYMEVEDNRSQVETDDLILKPGVVHVIDVDRGEEKKGKDQSGEVLSSV

SEQ ID NO: 4495 - DNA, 5151 bp, Homosapiens
cctttctagggacagtttggataattttccgtgaaactggatgatctttgaatattaaatgaaaggagactagaataacagtctcttgactattcatgaaggagctttagcagaagcattctttcttggtgtgcaaatcacgcctggcagcccctgcccacagtacccgaagatggcaggccttgttcccttcacctaaattcataaacctgggtgtagtggcttctgatgctgatttgtttctcttttcagtaagtgtggacctttgtgtaccagagagaacatcatggtggctttcaaaggggtctggactcaagctttctggaaagcagtcacagcggaatttctggccatgcttatttttgttctcctcagcctgggatccaccatcaactggggtggaacagaaaagcctttaccggtcgacatggttctcatctccctttgctttggactcagcattgcaaccatggtgcagtgctttggccatatcagcggtggccacatcaaccctgcagtgactgtggccatggtgtgcaccaggaagatcagcatcgccaagtctgtcttctacatcgcagcccagtgcctgggggccatcattggagcaggaatcctctatctggtcacacctcccagtgtggtgggaggcctgggagtcaccatggttcatggaaatcttaccgctggtcatggtctcctggttgagttgataatcacatttcaattggtgtttactatctttgccagctgtgattccaaacggactgatgtcactggctcaatagctttagcaattggattttctgttgcaattggacatttatttgcaatcaattatactggtgccagcatgaatcccgcccgatcctttggacctgcagttatcatgggaaattgggaaaaccattggatatattgggttgggcccatcataggagctgtcctcgctggtggcctttatgagtatgtcttctgtccagatgttgaattcaaacgtcgttttaaagaagccttcagcaaagctgcccagcaaacaaaaggaagctacatggaggtggaggacaacaggagtcaggtagagacggatgacctgattctaaaacctggagtggtgcatgtgattgacgttgaccggggagaggagaagaaggggaaagaccaatctggagaggtattgtcttcagtatgactagaagatcgcactgaaagcagacaagactccttagaactgtcctcagatttccttccacccattaaggaaacagatttgttataaattagaaatgtgcaggtttgttgtttcatgtcatattactcagtctaaacaataaatatttcataatttacaaaggaggaacggaagaaacctattgtgaattccaaatctaaaaaaagaaatatttttaaaatgttcttaagcaaatatatacctattttatctagttacctttcattaacaaccaattttaaccgtgtgtcaagatttggttaagtcttgcctgacagaactcaaagacacgtctatcagcttattccttctctactggaatattggtatagtcaattcttatttgaatatttattcttcctcctcaatgcccaaggtaatgtgggactaaagcccagaaatttgaaaagaatattcagaaatccttcccaaatcataagggcacctattgagattcaagacaagcagactcgtaaaatcttgtagaggcagaggcaaagttatcatcatacaaaaatcacaaacaaaaaggagatctgtattcgggtatcaaacggttgatctgttttcagtgcacaccctcaaatgcaccacaccagttttacgatctaagcttttaacccctttaccactttgcttatttttaaaaaatttattggcaaaactggggattttgtttgtaactttggttatctatatttaaacattagctgagacatatttttgataacaagaacttagctagttgagtcctggctttttgttgattattaagctgtgttcactctagaaggtgtaaaggccctgtcccaatctctgctctctcacttctcgtgacatttgttgataatctttactgcaagtgtaatgatatttgagtgaattaaaatgcatgacagacaaggtacaacatggttgcagaataaaagggtgaggacatcagatcactctgtattcaaagcttactagacgaacaatctttcatttctggatatattgtagctaacccaacacatttttaaactatttttgttactgactcacttacttgtcaaaataattggtttttctgtcctgctttgccttttgtcactagaatgttctccagaaaccccagtttctgtcatcttaactgtctagtctagccgttaacttagacaaagaagtgcaaatgtcaatttcactaaacaaaagctattagaagtaaagcagaaacctatcactgcaaggagtgacttgtaaataactgatgatcaagggctgtcttctctcaagcatggttccaactctgtgtcactttttagcgttaatggcagttgtgtgtctgtggcagtgagataatggaccactattaaacctgattctcttcggtgctaggaaagagtgatgtgtgagattcccagagagtcgtcacaccagtgttatgcctgggagtgccactggcataccgcaggtgcctaaatcccaggcccctttctcagggggcgtggccacaccacacactgcgccagtgacacatagttacttcctggctgggacggcacctatagaaactagggtacaaatctcccaaagatggtttgcaccgtcatttcaaatgtttgcacaatataccacttagaggcttaaaatcagggtggttcagttcaaaaggtaatatcaaccgtcagcaaacatgtcagtttaaaaataagttcggttaacaaggaagtgttaagcagattttttgaatacacttacaatatactggcttataatcatttttattctgccatatggtttatttcatatacactcacttttacactcacttccaattatagcattcaataagttacggttaaagaaaagtgaatggtgtttttgtaatttgttttctagtagctagcagagagcctggcacatagtatgtattcaaaacaagtgtgttaattaataaaaatatataaatctcatttgagatttaagaatataaataattttcttttaatctttattttgctcaatatttaataggaagtatgatttcaaggactactaaaggaaggcaatatacatgtgaaaaccataaaatacattttttgcattctactatttttaggggcatgaaatgaatgaaagctttagcacttttttgcccctacatatgagacaacatattttgtatttcactcaaggctctgccagtaaaaagtaatgaaattgtacctttctaatgacatctatgcagcaggggtctatcgccttgtggatggcaccaaattatccaagtgtattaggagactggggcttttttctttaatcccttcttattaatgaagtgcatagtgctgctcccaggagaccactgctgacagatacacagagaagagatcagagaggaaaaactgggaagacataaatgaattatacccagccatgaaacaatgccaactgtctcttccctaaggaagagtacaagtaccctaaaattgaaaggtggtccctacactgaaaacgcacatagtttgtcaaaagtgtacaaaagggaaagagtcttattttaagctttcaggctttcttaaaaacttggggaccagaatttcaatgtatgtttccattgttgaagataacattttcttcaaagagccttaaccttttgtactggaaggaaatattttctggacttaagtagttgcctaaatttaagattcctacactttatttctgccattgatgcttttcctaaacccttatactatctttttattatctgagccttttcctaatgcagctcataggtgctagctagagctgctgctcagtattgaagactttacaaggagattagaaatctttggaaaacatatgtgatgaaattgagctatatgatttatcagagatctgattccaaagagcacagaatactgttctcagaccatgaaaccagacaacacatgtattggtttaaactcgataatgacaggaaaattccaaactagagcagtaaattcaaatggtaagatgaatcctagaaggcctctgattgcagcatgttgacaccaacctcacgttacgaacaattcacagagaatttgcctttgtggcaactgaagatggaagtctggggggcacagacaaccttatcaaacaatataaaagccaatataaattctcataagcactatagaatttgcaaattcagaacattttatacctaaaagtaattctgtctttcctaaagtgtttttaacatgaaaattagtaggaagatgtggttactatttggaaagtgtaatgtaacaaaactctcttttgttaccacaaattttgtgagtttagtactctacagattgccccataagagcagtagcttttgaaactcataattctctgaaataaatgaaagacatttaattcaaggatcaaaaattgtggccatctttgcaaatgactacctatagcctgtgaaaatacatttcaaaaaatgttatgtgcaatgaacactaaatttaagagcagttacagtgtgactcactcatgtttaaaaaaaatcgaagagctaaaaaatacgtctaatttatgtaacccattggaatgtatttctaggttctcttcaggattaattaaataaacatgcaatttatgaaaacatataaacaattatttatcacttttatgacccaaatcacaataaaattgtcatttaggataaactggggagaatagactgaacatatggttatattcacagttatttattaacttaaatgttattccaacattagagctaatgttaaaaagatttaaactgtaacgtctaatatttggaataatatattaaagtattagcactgtggttgattttcttgaattatgttgcatcttgtactactaagcttgtgaaaataaacatttggatgttttaaaaggtaaacatt

SEQ ID NO: 4496 - protein, 301 aa, Homosapiens; identical to SEQ ID NO: 638

SEQ ID NO: 4497 - DNA, 5364 bp, Homosapiens
cctttctagggacagtttggataattttccgtgaaactggatgatctttgaatattaaatgaaaggagactagaataacagtctcttgactattcatgaaggagctttagcagaagcattctttcttggtgtgcaaatcacgcctggcagcccctgcccacagtacccgaagatggcaggccttgttcccttcacctaaattcataaacctgggtgtagtggcttctgatgctgatttgtttctcttttcagtaagtgtggacctttgtgtaccagagagaacatcatggtggctttcaaaggggtctggactcaagctttctggaaagcagtcacagcggaatttctggccatgcttatttttgttctcctcagcctgggatccaccatcaactggggtggaacagaaaagcctttaccggtcgacatggttctcatctccctttgctttggactcagcattgcaaccatggtgcagtgctttggccatatcagcggtggccacatcaaccctgcagtgactgtggccatggtgtgcaccaggaagatcagcatcgccaagtctgtcttctacatcgcagcccagtgcctgggggccatcattggagcaggaatcctctatctggtcacacctcccagtgtggtgggaggcctgggagtcaccatggttcatggaaatcttaccgctggtcatggtctcctggttgagttgataatcacatttcaattggtgtttactatctttgccagctgtgattccaaacggactgatgtcactggctcaatagctttagcaattggattttctgttgcaattggacatttatttgcaatcaattatactggtgccagcatgaatcccgcccgatcctttggacctgcagttatcatgggaaattgggaaaaccattggatatattgggttgggcccatcataggagctgtcctcgctggtggcctttatgagtatgtcttctgtccagatgttgaattcaaacgtcgttttaaagaagccttcagcaaagctgcccagcaaacaaaaggaagctacatggaggtggaggacaacaggagtcaggtagagacggatgacctgattctaaaacctggagtggtgcatgtgattgacgttgaccggggagaggagaagaaggggaaagaccaatctggagaggtattgtcttcagtatgactagaagatcgcactgaaagcagacaagactccttagaactgtcctcagatttccttccacccattaaggaaacagatttgttataaattagaaatgtgcaggtttgttgtttcatgtcatattactcagtctaaacaataaatatttcataatttacaaaggaggaacggaagaaacctattgtgaattccaaatctaaaaaaagaaatatttttaaaatgttcttaagcaaatatatacctattttatctagttacctttcattaacaaccaattttaaccgtgtgtcaagatttggttaagtcttgcctgacagaactcaaagacacgtctatcagcttattccttctctactggaatattggtatagtcaattcttatttgaatatttattctattaaactgagtttaacaatggcaaaatacagtatgtcacagtcatgcacattcaagagagaaaatataacaagttcttttatgagcaatcccttatgcatagactaccttggcaaaagagcattagcaagtgtcactgctcatcagttacttccttccatttatatcacaaatacccaagtttcaattctaacttcatttcatggtatttcttcctcctcaatgcccaaggtaatgtgggactaaagcccagaaatttgaaaagaatattcagaaatccttcccaaatcataagggcacctattgagattcaagacaagcagactcgtaaaatcttgtagaggcagaggcaaagttatcatcatacaaaaatcacaaacaaaaaggagatctgtattcgggtatcaaacggttgatctgttttcagtgcacaccctcaaatgcaccacaccagttttacgatctaagcttttaacccctttaccactttgcttatttttaaaaaatttattggcaaaactggggattttgtttgtaactttggttatctatatttaaacattagctgagacatatttttgataacaagaacttagctagttgagtcctggctttttgttgattattaagctgtgttcactctagaaggtgtaaaggccctgtcccaatctctgctctctcacttctcgtgacatttgttgataatctttactgcaagtgtaatgatatttgagtgaattaaaatgcatgacagacaaggtacaacatggttgcagaataaaagggtgaggacatcagatcactctgtattcaaagcttactagacgaacaatctttcatttctggatatattgtagctaacccaacacatttttaaactatttttgttactgactcacttacttgtcaaaataattggtttttctgtcctgctttgccttttgtcactagaatgttctccagaaaccccagtttctgtcatcttaactgtctagtctagccgttaacttagacaaagaagtgcaaatgtcaatttcactaaacaaaagctattagaagtaaagcagaaacctatcactgcaaggagtgacttgtaaataactgatgatcaagggctgtcttctctcaagcatggttccaactctgtgtcactttttagcgttaatggcagttgtgtgtctgtggcagtgagataatggaccactattaaacctgattctcttcggtgctaggaaagagtgatgtgtgagattcccagagagtcgtcacaccagtgttatgcctgggagtgccactggcataccgcaggtgcctaaatcccaggcccctttctcagggggcgtggccacaccacacactgcgccagtgacacatagttacttcctggctgggacggcacctatagaaactagggtacaaatctcccaaagatggtttgcaccgtcatttcaaatgtttgcacaatataccacttagaggcttaaaatcagggtggttcagttcaaaaggtaatatcaaccgtcagcaaacatgtcagtttaaaaataagttcggttaacaaggaagtgttaagcagattttttgaatacacttacaatatactggcttataatcatttttattctgccatatggtttatttcatatacactcacttttacactcacttccaattatagcattcaataagttacggttaaagaaaagtgaatggtgtttttgtaatttgttttctagtagctagcagagagcctggcacatagtatgtattcaaaacaagtgtgttaattaataaaaatatataaatctcatttgagatttaagaatataaataattttcttttaatctttattttgctcaatatttaataggaagtatgatttcaaggactactaaaggaaggcaatatacatgtgaaaaccataaaatacattttttgcattctactatttttaggggcatgaaatgaatgaaagctttagcacttttttgcccctacatatgagacaacatattttgtatttcactcaaggctctgccagtaaaaagtaatgaaattgtacctttctaatgacatctatgcagcaggggtctatcgccttgtggatggcaccaaattatccaagtgtattaggagactggggcttttttctttaatcccttcttattaatgaagtgcatagtgctgctcccaggagaccactgctgacagatacacagagaagagatcagagaggaaaaactgggaagacataaatgaattatacccagccatgaaacaatgccaactgtctcttccctaaggaagagtacaagtaccctaaaattgaaaggtggtccctacactgaaaacgcacatagtttgtcaaaagtgtacaaaagggaaagagtcttattttaagctttcaggctttcttaaaaacttggggaccagaatttcaatgtatgtttccattgttgaagataacattttcttcaaagagccttaaccttttgtactggaaggaaatattttctggacttaagtagttgcctaaatttaagattcctacactttatttctgccattgatgcttttcctaaacccttatactatctttttattatctgagccttttcctaatgcagctcataggtgctagctagagctgctgctcagtattgaagactttacaaggagattagaaatctttggaaaacatatgtgatgaaattgagctatatgatttatcagagatctgattccaaagagcacagaatactgttctcagaccatgaaaccagacaacacatgtattggtttaaactcgataatgacaggaaaattccaaactagagcagtaaattcaaatggtaagatgaatcctagaaggcctctgattgcagcatgttgacaccaacctcacgttacgaacaattcacagagaatttgcctttgtggcaactgaagatggaagtctggggggcacagacaaccttatcaaacaatataaaagccaatataaattctcataagcactatagaatttgcaaattcagaacattttatacctaaaagtaattctgtctttcctaaagtgtttttaacatgaaaattagtaggaagatgtggttactatttggaaagtgtaatgtaacaaaactctcttttgttaccacaaattttgtgagtttagtactctacagattgccccataagagcagtagcttttgaaactcataattctctgaaataaatgaaagacatttaattcaaggatcaaaaattgtggccatctttgcaaatgactacctatagcctgtgaaaatacatttcaaaaaatgttatgtgcaatgaacactaaatttaagagcagttacagtgtgactcactcatgtttaaaaaaaatcgaagagctaaaaaatacgtctaatttatgtaacccattggaatgtatttctaggttctcttcaggattaattaaataaacatgcaatttatgaaaacatataaacaattatttatcacttttatgacccaaatcacaataaaattgtcatttaggataaactggggagaatagactgaacatatggttatattcacagttatttattaacttaaatgttattccaacattagagctaatgttaaaaagatttaaactgtaacgtctaatatttggaataatatattaaagtattagcactgtggttgattttcttgaattatgttgcatcttgtactactaagcttgtgaaaataaacatttggatgttttaaaaggtaaacatt

SEQ ID NO: 4498 - protein, 301 aa, Homosapiens; identical to SEQ ID NO: 638

SEQ ID NO: 4499 - DNA, 5148 bp, Homosapiens
ccaaaaacccaatcagacaagtggccgtaatctgactcccagcacacagggagctgcggggcaggcaatgagagctgcactctggctggggaaggcatgagtgacagacccacagcaaggcggtggggtaagtgtggacctttgtgtaccagagagaacatcatggtggctttcaaaggggtctggactcaagctttctggaaagcagtcacagcggaatttctggccatgcttatttttgttctcctcagcctgggatccaccatcaactggggtggaacagaaaagcctttaccggtcgacatggttctcatctccctttgctttggactcagcattgcaaccatggtgcagtgctttggccatatcagcggtggccacatcaaccctgcagtgactgtggccatggtgtgcaccaggaagatcagcatcgccaagtctgtcttctacatcgcagcccagtgcctgggggccatcattggagcaggaatcctctatctggtcacacctcccagtgtggtgggaggcctgggagtcaccatggttcatggaaatcttaccgctggtcatggtctcctggttgagttgataatcacatttcaattggtgtttactatctttgccagctgtgattccaaacggactgatgtcactggctcaatagctttagcaattggattttctgttgcaattggacatttatttgcaatcaattatactggtgccagcatgaatcccgcccgatcctttggacctgcagttatcatgggaaattgggaaaaccattggatatattgggttgggcccatcataggagctgtcctcgctggtggcctttatgagtatgtcttctgtccagatgttgaattcaaacgtcgttttaaagaagccttcagcaaagctgcccagcaaacaaaaggaagctacatggaggtggaggacaacaggagtcaggtagagacggatgacctgattctaaaacctggagtggtgcatgtgattgacgttgaccggggagaggagaagaaggggaaagaccaatctggagaggtattgtcttcagtatgactagaagatcgcactgaaagcagacaagactccttagaactgtcctcagatttccttccacccattaaggaaacagatttgttataaattagaaatgtgcaggtttgttgtttcatgtcatattactcagtctaaacaataaatatttcataatttacaaaggaggaacggaagaaacctattgtgaattccaaatctaaaaaaagaaatatttttaaaatgttcttaagcaaatatatacctattttatctagttacctttcattaacaaccaattttaaccgtgtgtcaagatttggttaagtcttgcctgacagaactcaaagacacgtctatcagcttattccttctctactggaatattggtatagtcaattcttatttgaatatttattctattaaactgagtttaacaatggcaaaatacagtatgtcacagtcatgcacattcaagagagaaaatataacaagttcttttatgagcaatcccttatgcatagactaccttggcaaaagagcattagcaagtgtcactgctcatcagttacttccttccatttatatcacaaatacccaagtttcaattctaacttcatttcatggtatttcttcctcctcaatgcccaaggtaatgtgggactaaagcccagaaatttgaaaagaatattcagaaatccttcccaaatcataagggcacctattgagattcaagacaagcagactcgtaaaatcttgtagaggcagaggcaaagttatcatcatacaaaaatcacaaacaaaaaggagatctgtattcgggtatcaaacggttgatctgttttcagtgcacaccctcaaatgcaccacaccagttttacgatctaagcttttaacccctttaccactttgcttatttttaaaaaatttattggcaaaactggggattttgtttgtaactttggttatctatatttaaacattagctgagacatatttttgataacaagaacttagctagttgagtcctggctttttgttgattattaagctgtgttcactctagaaggtgtaaaggccctgtcccaatctctgctctctcacttctcgtgacatttgttgataatctttactgcaagtgtaatgatatttgagtgaattaaaatgcatgacagacaaggtacaacatggttgcagaataaaagggtgaggacatcagatcactctgtattcaaagcttactagacgaacaatctttcatttctggatatattgtagctaacccaacacatttttaaactatttttgttactgactcacttacttgtcaaaataattggtttttctgtcctgctttgccttttgtcactagaatgttctccagaaaccccagtttctgtcatcttaactgtctagtctagccgttaacttagacaaagaagtgcaaatgtcaatttcactaaacaaaagctattagaagtaaagcagaaacctatcactgcaaggagtgacttgtaaataactgatgatcaagggctgtcttctctcaagcatggttccaactctgtgtcactttttagcgttaatggcagttgtgtgtctgtggcagtgagataatggaccactattaaacctgattctcttcggtgctaggaaagagtgatgtgtgagattcccagagagtcgtcacaccagtgttatgcctgggagtgccactggcataccgcaggtgcctaaatcccaggcccctttctcagggggcgtggccacaccacacactgcgccagtgacacatagttacttcctggctgggacggcacctatagaaactagggtacaaatctcccaaagatggtttgcaccgtcatttcaaatgtttgcacaatataccacttagaggcttaaaatcagggtggttcagttcaaaaggtaatatcaaccgtcagcaaacatgtcagtttaaaaataagttcggttaacaaggaagtgttaagcagattttttgaatacacttacaatatactggcttataatcatttttattctgccatatggtttatttcatatacactcacttttacactcacttccaattatagcattcaataagttacggttaaagaaaagtgaatggtgtttttgtaatttgttttctagtagctagcagagagcctggcacatagtatgtattcaaaacaagtgtgttaattaataaaaatatataaatctcatttgagatttaagaatataaataattttcttttaatctttattttgctcaatatttaataggaagtatgatttcaaggactactaaaggaaggcaatatacatgtgaaaaccataaaatacattttttgcattctactatttttaggggcatgaaatgaatgaaagctttagcacttttttgcccctacatatgagacaacatattttgtatttcactcaaggctctgccagtaaaaagtaatgaaattgtacctttctaatgacatctatgcagcaggggtctatcgccttgtggatggcaccaaattatccaagtgtattaggagactggggcttttttctttaatcccttcttattaatgaagtgcatagtgctgctcccaggagaccactgctgacagatacacagagaagagatcagagaggaaaaactgggaagacataaatgaattatacccagccatgaaacaatgccaactgtctcttccctaaggaagagtacaagtaccctaaaattgaaaggtggtccctacactgaaaacgcacatagtttgtcaaaagtgtacaaaagggaaagagtcttattttaagctttcaggctttcttaaaaacttggggaccagaatttcaatgtatgtttccattgttgaagataacattttcttcaaagagccttaaccttttgtactggaaggaaatattttctggacttaagtagttgcctaaatttaagattcctacactttatttctgccattgatgcttttcctaaacccttatactatctttttattatctgagccttttcctaatgcagctcataggtgctagctagagctgctgctcagtattgaagactttacaaggagattagaaatcagacaacacatgtattggtttaaactcgataatgacaggaaaattccaaactagagcagtaaattcaaatggtaagatgaatcctagaaggcctctgattgcagcatgttgacaccaacctcacgttacgaacaattcacagagaatttgcctttgtggcaactgaagatggaagtctggggggcacagacaaccttatcaaacaatataaaagccaatataaattctcataagcactatagaatttgcaaattcagaacattttatacctaaaagtaattctgtctttcctaaagtgtttttaacatgaaaattagtaggaagatgtggttactatttggaaagtgtaatgtaacaaaactctcttttgttaccacaaattttgtgagtttagtactctacagattgccccataagagcagtagcttttgaaactcataattctctgaaataaatgaaagacatttaattcaaggatcaaaaattgtggccatctttgcaaatgactacctatagcctgtgaaaatacatttcaaaaaatgttatgtgcaatgaacactaaatttaagagcagttacagtgtgactcactcatgtttaaaaaaaatcgaagagctaaaaaatacgtctaatttatgtaacccattggaatgtatttctaggttctcttcaggattaattaaataaacatgcaatttatgaaaacatataaacaattatttatcacttttatgacccaaatcacaataaaattgtcatttaggataaactggggagaatagactgaacatatggttatattcacagttatttattaacttaaatgttattccaacattagagctaatgttaaaaagatttaaactgtaacgtctaatatttggaataatatattaaagtattagcactgtggttgattttcttgaattatgttgcatcttgtactactaagcttgtgaaaataaacatttggatgttttaaaaggtaaacatt

SEQ ID NO: 4500 - protein, 323 aa, Homosapiens; identical to SEQ ID NO: 636

SEQ ID NO: 4501 - DNA, 5240 bp, Homosapiens
ccaaaaacccaatcagacaagtggccgtaatctgactcccagcacacagggagctgcggggcaggcaatgagagctgcactctggctggggaaggcatgagtgacagacccacagcaaggcggtggggtaagtgtggacctttgtgtaccagagagaacatcatggtggctttcaaaggggtctggactcaagctttctggaaagcagtcacagcggaatttctggccatgcttatttttgttctcctcagcctgggatccaccatcaactggggtggaacagaaaagcctttaccggtcgacatggttctcatctccctttgctttggactcagcattgcaaccatggtgcagtgctttggccatatcagcggtggccacatcaaccctgcagtgactgtggccatggtgtgcaccaggaagatcagcatcgccaagtctgtcttctacatcgcagcccagtgcctgggggccatcattggagcaggaatcctctatctggtcacacctcccagtgtggtgggaggcctgggagtcaccatggttcatggaaatcttaccgctggtcatggtctcctggttgagttgataatcacatttcaattggtgtttactatctttgccagctgtgattccaaacggactgatgtcactggctcaatagctttagcaattggattttctgttgcaattggacatttatttgcaatcaattatactggtgccagcatgaatcccgcccgatcctttggacctgcagttatcatgggaaattgggaaaaccattggatatattgggttgggcccatcataggagctgtcctcgctggtggcctttatgagtatgtcttctgtccagatgttgaattcaaacgtcgttttaaagaagccttcagcaaagctgcccagcaaacaaaaggaagctacatggaggtggaggacaacaggagtcaggtagagacggatgacctgattctaaaacctggagtggtgcatgtgattgacgttgaccggggagaggagaagaaggggaaagaccaatctggagaggtattgtcttcagtatgactagaagatcgcactgaaagcagacaagactccttagaactgtcctcagatttccttccacccattaaggaaacagatttgttataaattagaaatgtgcaggtttgttgtttcatgtcatattactcagtctaaacaataaatatttcataatttacaaaggaggaacggaagaaacctattgtgaattccaaatctaaaaaaagaaatatttttaaaatgttcttaagcaaatatatacctattttatctagttacctttcattaacaaccaattttaaccgtgtgtcaagatttggttaagtcttgcctgacagaactcaaagacacgtctatcagcttattccttctctactggaatattggtatagtcaattcttatttgaatatttattctattaaactgagtttaacaatggcaaaatacagtatgtcacagtcatgcacattcaagagagaaaatataacaagttcttttatgagcaatcccttatgcatagactaccttggcaaaagagcattagcaagtgtcactgctcatcagttacttccttccatttatatcacaaatacccaagtttcaattctaacttcatttcatggtatttcttcctcctcaatgcccaaggtaatgtgggactaaagcccagaaatttgaaaagaatattcagaaatccttcccaaatcataagggcacctattgagattcaagacaagcagactcgtaaaatcttgtagaggcagaggcaaagttatcatcatacaaaaatcacaaacaaaaaggagatctgtattcgggtatcaaacggttgatctgttttcagtgcacaccctcaaatgcaccacaccagttttacgatctaagcttttaacccctttaccactttgcttatttttaaaaaatttattggcaaaactggggattttgtttgtaactttggttatctatatttaaacattagctgagacatatttttgataacaagaacttagctagttgagtcctggctttttgttgattattaagctgtgttcactctagaaggtgtaaaggccctgtcccaatctctgctctctcacttctcgtgacatttgttgataatctttactgcaagtgtaatgatatttgagtgaattaaaatgcatgacagacaaggtacaacatggttgcagaataaaagggtgaggacatcagatcactctgtattcaaagcttactagacgaacaatctttcatttctggatatattgtagctaacccaacacatttttaaactatttttgttactgactcacttacttgtcaaaataattggtttttctgtcctgctttgccttttgtcactagaatgttctccagaaaccccagtttctgtcatcttaactgtctagtctagccgttaacttagacaaagaagtgcaaatgtcaatttcactaaacaaaagctattagaagtaaagcagaaacctatcactgcaaggagtgacttgtaaataactgatgatcaagggctgtcttctctcaagcatggttccaactctgtgtcactttttagcgttaatggcagttgtgtgtctgtggcagtgagataatggaccactattaaacctgattctcttcggtgctaggaaagagtgatgtgtgagattcccagagagtcgtcacaccagtgttatgcctgggagtgccactggcataccgcaggtgcctaaatcccaggcccctttctcagggggcgtggccacaccacacactgcgccagtgacacatagttacttcctggctgggacggcacctatagaaactagggtacaaatctcccaaagatggtttgcaccgtcatttcaaatgtttgcacaatataccacttagaggcttaaaatcagggtggttcagttcaaaaggtaatatcaaccgtcagcaaacatgtcagtttaaaaataagttcggttaacaaggaagtgttaagcagattttttgaatacacttacaatatactggcttataatcatttttattctgccatatggtttatttcatatacactcacttttacactcacttccaattatagcattcaataagttacggttaaagaaaagtgaatggtgtttttgtaatttgttttctagtagctagcagagagcctggcacatagtatgtattcaaaacaagtgtgttaattaataaaaatatataaatctcatttgagatttaagaatataaataattttcttttaatctttattttgctcaatatttaataggaagtatgatttcaaggactactaaaggaaggcaatatacatgtgaaaaccataaaatacattttttgcattctactatttttaggggcatgaaatgaatgaaagctttagcacttttttgcccctacatatgagacaacatattttgtatttcactcaaggctctgccagtaaaaagtaatgaaattgtacctttctaatgacatctatgcagcaggggtctatcgccttgtggatggcaccaaattatccaagtgtattaggagactggggcttttttctttaatcccttcttattaatgaagtgcatagtgctgctcccaggagaccactgctgacagatacacagagaagagatcagagaggaaaaactgggaagacataaatgaattatacccagccatgaaacaatgccaactgtctcttccctaaggaagagtacaagtaccctaaaattgaaaggtggtccctacactgaaaacgcacatagtttgtcaaaagtgtacaaaagggaaagagtcttattttaagctttcaggctttcttaaaaacttggggaccagaatttcaatgtatgtttccattgttgaagataacattttcttcaaagagccttaaccttttgtactggaaggaaatattttctggacttaagtagttgcctaaatttaagattcctacactttatttctgccattgatgcttttcctaaacccttatactatctttttattatctgagccttttcctaatgcagctcataggtgctagctagagctgctgctcagtattgaagactttacaaggagattagaaatctttggaaaacatatgtgatgaaattgagctatatgatttatcagagatctgattccaaagagcacagaatactgttctcagaccatgaaaccagacaacacatgtattggtttaaactcgataatgacaggaaaattccaaactagagcagtaaattcaaatggtaagatgaatcctagaaggcctctgattgcagcatgttgacaccaacctcacgttacgaacaattcacagagaatttgcctttgtggcaactgaagatggaagtctggggggcacagacaaccttatcaaacaatataaaagccaatataaattctcataagcactatagaatttgcaaattcagaacattttatacctaaaagtaattctgtctttcctaaagtgtttttaacatgaaaattagtaggaagatgtggttactatttggaaagtgtaatgtaacaaaactctcttttgttaccacaaattttgtgagtttagtactctacagattgccccataagagcagtagcttttgaaactcataattctctgaaataaatgaaagacatttaattcaaggatcaaaaattgtggccatctttgcaaatgactacctatagcctgtgaaaatacatttcaaaaaatgttatgtgcaatgaacactaaatttaagagcagttacagtgtgactcactcatgtttaaaaaaaatcgaagagctaaaaaatacgtctaatttatgtaacccattggaatgtatttctaggttctcttcaggattaattaaataaacatgcaatttatgaaaacatataaacaattatttatcacttttatgacccaaatcacaataaaattgtcatttaggataaactggggagaatagactgaacatatggttatattcacagttatttattaacttaaatgttattccaacattagagctaatgttaaaaagatttaaactgtaacgtctaatatttggaataatatattaaagtattagcactgtggttgattttcttgaattatgttgcatcttgtactactaagcttgtgaaaataaacatttggatgttttaaaaggtaaacatt

SEQ ID NO: 4502 - protein, 323 aa, Homosapiens; identical to SEQ ID NO: 636

SEQ ID NO: 4503 - DNA, 2906 bp, Homosapiens
tttagctattttcaaactaggactccaagcttcttgcaaactctttgctaaataatgccttggtggcatgaggcacatccctaaaatagctaatttactcctagggaatttttgatgattcttaatagtgtgaaaactgattctggcagtatttaggttcatggaaatcttaccgctggtcatggtctcctggttgagttgataatcacatttcaattggtgtttactatctttgccagctgtgattccaaacggactgatgtcactggctcaatagctttagcaattggattttctgttgcaattggacatttatttgcaatcaattatactggtgccagcatgaatcccgcccgatcctttggacctgcagttatcatgggaaattgggaaaaccattggatatattgggttgggcccatcataggagctgtcctcgctggtggcctttatgagtatgtcttctgtccagatgttgaattcaaacgtcgttttaaagaagccttcagcaaagctgcccagcaaacaaaaggaagctacatggaggtggaggacaacaggagtcaggtagagacggatgacctgattctaaaacctggagtggtgcatgtgattgacgttgaccggggagaggagaagaaggggaaagaccaatctggagaggtattgtcttcagtatgactagaagatcgcactgaaagcagacaagactccttagaactgtcctcagatttccttccacccattaaggaaacagatttgttataaattagaaatgtgcaggtttgttgtttcatgtcatattactcagtctaaacaataaatatttcataatttacaaaggaggaacggaagaaacctattgtgaattccaaatctaaaaaaagaaatatttttaaaatgttcttaagcaaatatatacctattttatctagttacctttcattaacaaccaattttaaccgtgtgtcaagatttggttaagtcttgcctgacagaactcaaagacacgtctatcagcttattccttctctactggaatattggtatagtcaattcttatttgaatatttattctattaaactgagtttaacaatggcaaaatacagtatgtcacagtcatgcacattcaagagagaaaatataacaagttcttttatgagcaatcccttatgcatagactaccttggcaaaagagcattagcaagtgtcactgctcatcagttacttccttccatttatatcacaaatacccaagtttcaattctaacttcatttcatggtatttcttcctcctcaatgcccaaggtaatgtgggactaaagcccagaaatttgaaaagaatattcagaaatccttcccaaatcataagggcacctattgagattcaagacaagcagactcgtaaaatcttgtagaggcagaggcaaagttatcatcatacaaaaatcacaaacaaaaaggagatctgtattcgggtatcaaacggttgatctgttttcagtgcacaccctcaaatgcaccacaccagttttacgatctaagcttttaacccctttaccactttgcttatttttaaaaaatttattggcaaaactggggattttgtttgtaactttggttatctatatttaaacattagctgagacatatttttgataacaagaacttagctagttgagtcctggctttttgttgattattaagctgtgttcactctagaaggtgtaaaggccctgtcccaatctctgctctctcacttctcgtgacatttgttgataatctttactgcaagtgtaatgatatttgagtgaattaaaatgcatgacagacaaggtacaacatggttgcagaataaaagggtgaggacatcagatcactctgtattcaaagcttactagacgaacaatctttcatttctggatatattgtagctaacccaacacatttttaaactatttttgttactgactcacttacttgtcaaaataattggtttttctgtcctgctttgccttttgtcactagaatgttctccagaaaccccagtttctgtcatcttaactgtctagtctagccgttaacttagacaaagaagtgcaaatgtcaatttcactaaacaaaagctattagaagtaaagcagaaacctatcactgcaaggagtgacttgtaaataactgatgatcaagggctgtcttctctcaagcatggttccaactctgtgtcactttttagcgttaatggcagttgtgtgtctgtggcagtgagataatggaccactattaaacctgattctcttcggtgctaggaaagagtgatgtgtgagattcccagagagtcgtcacaccagtgttatgcctgggagtgccactggcataccgcaggtgcctaaatcccaggcccctttctcagggggcgtggccacaccacacactgcgccagtgacacatagttacttcctggctgggacggcacctatagaaactagggtacaaatctcccaaagatggtttgcaccgtcatttcaaatgtttgcacaatataccacttagaggcttaaaatcagggtggttcagttcaaaaggtaatatcaaccgtcagcaaacatgtcagtttaaaaataagttcggttaacaaggaagtgttaagcagattttttgaatacacttacaatatactggcttataatcatttttattctgccatatggtttatttcatatacactcacttttacactcacttccaattatagcattcaataagttacggttaaagaaaagtgaatggtgtttttgtaatttgttttctagtagctagcagagagcctggcacatagtatgtattcaaaacaagtgtgttaattaataaaaatatataaatctcatttgagatttaagaatat

SEQ ID NO: 4504 - protein, 112 aa, Homosapiens; identical to SEQ ID NO: 4494

SEQ ID NO: 4505 - DNA, 3204 bp, Homosapiens
cctttctagggacagtttggataattttccgtgaaactggatgatctttgaatattaaatgaaaggagactagaataacagtctcttgactattcatgaaggagctttagcagaagcattctttcttggtgtgcaaatcacgcctggcagcccctgcccacagtacccgaagatggcaggccttgttcccttcacctaaattcataaacctgggtgtagtggcttctgatgctgatttgtttctcttttcagtaagtgtggacctttgtgtaccagagagaacatcatggtggctttcaaaggggtctggactcaagctttctggaaagcagtcacagcggaatttctggccatgcttatttttgttctcctcagcctgggatccaccatcaactggggtggaacagaaaagcctttaccggtcgacatggttctcatctccctttgctttggactcagcattgcaaccatggtgcagtgctttggccatatcagcggtggccacatcaaccctgcagtgactgtggccatggtgtgcaccaggaagatcagcatcgccaagtctgtcttctacatcgcagcccagtgcctgggggccatcattggagcaggaatcctctatctggtcacacctcccagtgtggtgggaggcctgggagtcaccatggttcatggaaatcttaccgctggtcatggtctcctggttgagttgataatcacatttcaattggtgtttactatctttgccagctgtgattccaaacggactgatgtcactggctcaatagctttagcaattggattttctgttgcaattggacatttatttgcaatcaattatactggtgccagcatgaatcccgcccgatcctttggacctgcagttatcatgggaaattgggaaaaccattggatatattgggttgggcccatcataggagctgtcctcgctggtggcctttatgagtatgtcttctgtccagatgttgaattcaaacgtcgttttaaagaagccttcagcaaagctgcccagcaaacaaaaggaagctacatggaggtggaggacaacaggagtcaggtagagacggatgacctgattctaaaacctggagtggtgcatgtgattgacgttgaccggggagaggagaagaaggggaaagaccaatctggagaggtattgtcttcagtatgactagaagatcgcactgaaagcagacaagactccttagaactgtcctcagatttccttccacccattaaggaaacagatttgttataaattagaaatgtgcaggtttgttgtttcatgtcatattactcagtctaaacaataaatatttcataatttacaaaggaggaacggaagaaacctattgtgaattccaaatctaaaaaaagaaatatttttaaaatgttcttaagcaaatatatacctattttatctagttacctttcattaacaaccaattttaaccgtgtgtcaagatttggttaagtcttgcctgacagaactcaaagacacgtctatcagcttattccttctctactggaatattggtatagtcaattcttatttgaatatttattcttcctcctcaatgcccaaggtaatgtgggactaaagcccagaaatttgaaaagaatattcagaaatccttcccaaatcataagggcacctattgagattcaagacaagcagactcgtaaaatcttgtagaggcagaggcaaagttatcatcatacaaaaatcacaaacaaaaaggagatctgtattcgggtatcaaacggttgatctgttttcagtgcacaccctcaaatgcaccacaccagttttacgatctaagcttttaacccctttaccactttgcttatttttaaaaaatttattggcaaaactggggattttgtttgtaactttggttatctatatttaaacattagctgagacatatttttgataacaagaacttagctagttgagtcctggctttttgttgattattaagctgtgttcactctagaaggtgtaaaggccctgtcccaatctctgctctctcacttctcgtgacatttgttgataatctttactgcaagtgtaatgatatttgagtgaattaaaatgcatgacagacaaggtacaacatggttgcagaataaaagggtgaggacatcagatcactctgtattcaaagcttactagacgaacaatctttcatttctggatatattgtagctaacccaacacatttttaaactatttttgttactgactcacttacttgtcaaaataattggtttttctgtcctgctttgccttttgtcactagaatgttctccagaaaccccagtttctgtcatcttaactgtctagtctagccgttaacttagacaaagaagtgcaaatgtcaatttcactaaacaaaagctattagaagtaaagcagaaacctatcactgcaaggagtgacttgtaaataactgatgatcaagggctgtcttctctcaagcatggttccaactctgtgtcactttttagcgttaatggcagttgtgtgtctgtggcagtgagataatggaccactattaaacctgattctcttcggtgctaggaaagagtgatgtgtgagattcccagagagtcgtcacaccagtgttatgcctgggagtgccactggcataccgcaggtgcctaaatcccaggcccctttctcagggggcgtggccacaccacacactgcgccagtgacacatagttacttcctggctgggacggcacctatagaaactagggtacaaatctcccaaagatggtttgcaccgtcatttcaaatgtttgcacaatataccacttagaggcttaaaatcagggtggttcagttcaaaaggtaatatcaaccgtcagcaaacatgtcagtttaaaaataagttcggttaacaaggaagtgttaagcagattttttgaatacacttacaatatactggcttataatcatttttattctgccatatggtttatttcatatacactcacttttacactcacttccaattatagcattcaataagttacggttaaagaaaagtgaatggtgtttttgtaatttgttttctagtagctagcagagagcctggcacatagtatgtattcaaaacaagtgtgttaattaataaaaatatataaatctcatttgagatttaagaatat

SEQ ID NO: 4506 - protein, 301 aa, Homosapiens; identical to SEQ ID NO: 638

SEQ ID NO: 4507 - DNA, 3293 bp, Homosapiens
ccaaaaacccaatcagacaagtggccgtaatctgactcccagcacacagggagctgcggggcaggcaatgagagctgcactctggctggggaaggcatgagtgacagacccacagcaaggcggtggggtaagtgtggacctttgtgtaccagagagaacatcatggtggctttcaaaggggtctggactcaagctttctggaaagcagtcacagcggaatttctggccatgcttatttttgttctcctcagcctgggatccaccatcaactggggtggaacagaaaagcctttaccggtcgacatggttctcatctccctttgctttggactcagcattgcaaccatggtgcagtgctttggccatatcagcggtggccacatcaaccctgcagtgactgtggccatggtgtgcaccaggaagatcagcatcgccaagtctgtcttctacatcgcagcccagtgcctgggggccatcattggagcaggaatcctctatctggtcacacctcccagtgtggtgggaggcctgggagtcaccatggttcatggaaatcttaccgctggtcatggtctcctggttgagttgataatcacatttcaattggtgtttactatctttgccagctgtgattccaaacggactgatgtcactggctcaatagctttagcaattggattttctgttgcaattggacatttatttgcaatcaattatactggtgccagcatgaatcccgcccgatcctttggacctgcagttatcatgggaaattgggaaaaccattggatatattgggttgggcccatcataggagctgtcctcgctggtggcctttatgagtatgtcttctgtccagatgttgaattcaaacgtcgttttaaagaagccttcagcaaagctgcccagcaaacaaaaggaagctacatggaggtggaggacaacaggagtcaggtagagacggatgacctgattctaaaacctggagtggtgcatgtgattgacgttgaccggggagaggagaagaaggggaaagaccaatctggagaggtattgtcttcagtatgactagaagatcgcactgaaagcagacaagactccttagaactgtcctcagatttccttccacccattaaggaaacagatttgttataaattagaaatgtgcaggtttgttgtttcatgtcatattactcagtctaaacaataaatatttcataatttacaaaggaggaacggaagaaacctattgtgaattccaaatctaaaaaaagaaatatttttaaaatgttcttaagcaaatatatacctattttatctagttacctttcattaacaaccaattttaaccgtgtgtcaagatttggttaagtcttgcctgacagaactcaaagacacgtctatcagcttattccttctctactggaatattggtatagtcaattcttatttgaatatttattctattaaactgagtttaacaatggcaaaatacagtatgtcacagtcatgcacattcaagagagaaaatataacaagttcttttatgagcaatcccttatgcatagactaccttggcaaaagagcattagcaagtgtcactgctcatcagttacttccttccatttatatcacaaatacccaagtttcaattctaacttcatttcatggtatttcttcctcctcaatgcccaaggtaatgtgggactaaagcccagaaatttgaaaagaatattcagaaatccttcccaaatcataagggcacctattgagattcaagacaagcagactcgtaaaatcttgtagaggcagaggcaaagttatcatcatacaaaaatcacaaacaaaaaggagatctgtattcgggtatcaaacggttgatctgttttcagtgcacaccctcaaatgcaccacaccagttttacgatctaagcttttaacccctttaccactttgcttatttttaaaaaatttattggcaaaactggggattttgtttgtaactttggttatctatatttaaacattagctgagacatatttttgataacaagaacttagctagttgagtcctggctttttgttgattattaagctgtgttcactctagaaggtgtaaaggccctgtcccaatctctgctctctcacttctcgtgacatttgttgataatctttactgcaagtgtaatgatatttgagtgaattaaaatgcatgacagacaaggtacaacatggttgcagaataaaagggtgaggacatcagatcactctgtattcaaagcttactagacgaacaatctttcatttctggatatattgtagctaacccaacacatttttaaactatttttgttactgactcacttacttgtcaaaataattggtttttctgtcctgctttgccttttgtcactagaatgttctccagaaaccccagtttctgtcatcttaactgtctagtctagccgttaacttagacaaagaagtgcaaatgtcaatttcactaaacaaaagctattagaagtaaagcagaaacctatcactgcaaggagtgacttgtaaataactgatgatcaagggctgtcttctctcaagcatggttccaactctgtgtcactttttagcgttaatggcagttgtgtgtctgtggcagtgagataatggaccactattaaacctgattctcttcggtgctaggaaagagtgatgtgtgagattcccagagagtcgtcacaccagtgttatgcctgggagtgccactggcataccgcaggtgcctaaatcccaggcccctttctcagggggcgtggccacaccacacactgcgccagtgacacatagttacttcctggctgggacggcacctatagaaactagggtacaaatctcccaaagatggtttgcaccgtcatttcaaatgtttgcacaatataccacttagaggcttaaaatcagggtggttcagttcaaaaggtaatatcaaccgtcagcaaacatgtcagtttaaaaataagttcggttaacaaggaagtgttaagcagattttttgaatacacttacaatatactggcttataatcatttttattctgccatatggtttatttcatatacactcacttttacactcacttccaattatagcattcaataagttacggttaaagaaaagtgaatggtgtttttgtaatttgttttctagtagctagcagagagcctggcacatagtatgtattcaaaacaagtgtgttaattaataaaaatatataaatctcatttgagatttaagaatat

SEQ ID NO: 4508 - protein, 323 aa, Homosapiens; identical to SEQ ID NO: 636

SEQ ID NO: 4509 - DNA, 3293 bp, Homosapiens; identical to SEQ ID NO: 4507

SEQ ID NO: 4510 - protein, 323 aa, Homosapiens; identical to SEQ ID NO: 636

SEQ ID NO: 4511 - DNA, 2167 bp, Homosapiens
attactttctagctgaacactcagcttcatccactccaggacagctgagcgtctggggcttcagaagctgatggcatagttatgagaggggtgaagactgcgactgcatttccaacagaccctgaggacaattgggaagaatgttctggtgaaacgcaactccatcaacacctccccagtccgatcttatcctctacgtcttttctcagtgacaccttcctctcatacgagtaaaactagaaaaaaatgatagaatgcgatttatgttgattcctggtcaagtgaacacaagccggcccactgaaccagaagaaaagagtaatagaactcttgaaagagaagataaaacccaccgtatccagatattgctgggaagaaaaataaaaacaactattaaaaatttaaaatcacttttagaaagcttccttgcattagtgctatgaaatagaaagagtcttggagaacaggatttgttcacgttaagttgggcaagtcttctcttcctgggctcagtttcctcatctgcagtgcatgaggtcattgaactccataagccctaaggatccttctggtttcaaaaatcccataacgtctgatatagaacacttaccttgacaaagctcttcaagtcattttcaccttcacatattgatttatctgtgtagtgacatttaaagtgaattctaatcaggaaataaaaggctgatttcttcagtagaagaaattgacaataaaaaaatgtgaatacaagagagaaacaaaggcctgattaccagaagtcgatctataggatacagaatgtggcattgtacaaagtagaaattcctttctaaaatttaagaagaaatcattgtaacatcaggaataaacaggaaaaaggagaaagcattaagattttccagtcaaggagagatctggaaacataatgatttacctcctgccatagcaagcatggtatagcaaattttatgatttggggttgatcaaaattattgtgtgacgaagacataattaaaaaaagatttgactctgtctctaaccttttttaaggaaggaattattttcttaaaaatcaagaacaaatcaaggaccaaatatctataactaaagcacaaattaagtgttcagaagaatattggggagaaaaagcagaatgcaaaaggaaaaatgccttatggaaagagcataggattaatagtaaatgaggaagaactatgactcctaaagaattataaattttaaattgtatgaaaaataatattggtaaaacagaaaaactaagagataattgtaagtaaataaaaatgaaacaagatgtgttgccattattattatatatcagctgccccagtaaagcaataattcaaggtcaaataacttagaatggtcagcacctaatagtcttggtaaatagagcaggtcaataaatatatattgattggttgattgaataagaaatgcttgcagttattttaggaaaatcaaagttgcttgggaagttatgcatgtaatttcttaaactaagcaagtataaatttccttttgaaacaatataaaacaaaacctttcctaacagttacctctaaatcctaaacaatgaaatcttttataagataatgtttatatatagcaaaacctaaattggaaatagataaaatgtggaaatataaatgtgcttctgtagaaagaaattatattttatatctttgatggtttttgataggtggttggaatagggaaaattctgtgtgaacaatttaccaaaaaaatgctatactttcctctaaaccaatatttggacatataaatattttccaactgggttcagtttttgatatggccaaagataatgatatgttatttcaagactgtaagtcaaaataaaattgatttgaaatggtctgaattaatgagatgccttccatcctgtaagtttcaacattgtcatctcaagtgataagataatgatggaccgtttcttaccaaatattttattaattaactcacgaagcttggcctgttcagtcagtatagacactatgttccggtgccttggatgtgattagcaagatgtgattcctttaaataatgagctcaaaacacatattaaatttagaagtggtaagcttacaggaaaaagaaagatctgctgggagtgaataaaagg

SEQ ID NO: 4512 - protein, 50 aa, Homosapiens
MRGVKTATAFPTDPEDNWEECSGETQLHQHLPSPILSSTSFLSDTFLSYE

SEQ ID NO: 4513 - DNA, 2392 bp, Homosapiens
actttctagctgaacactcagcttcatccactccaggacagctgagcgtctggatggtgtctcaccctgttgcccaggctggaatacagtggcacgatcctggctcactgcaatctccatctcccgggttcaagcgattctcctgcctcagcctctcaagtagctgggattacagggcttcagaagctgatggcatagttatgagaggggtgaagactgcgactgcatttccaacagaccctgaggacaattgggaagaatgcgctgaatatttttgagcaatttctatatgataagcagtttttagggcaagtataggttgcactgatcctgaccttttggcctgaggatggaagtcttcagtatctgtacaactttactcccaagagctggtgtagaatgagttcctctggccatgggaggatcgcagaggggcacctgccaccagcagcccagcctcagcacttttctcttcagcgtcttcttcaaggtatttccagttgcccgccctgaactgtttcagaatgaggaggacacctggaggaatctacacgtgcatagaccaatttgcaaaagaacctgtgagccaacattattacctcagctggaagaattaataagcaacacgttcacccaagaagtatttactgagcacctactatgtgcattattttctggtgttggggctagggggcaaacgactctgacaagtctctgttctcaaggctggagtgcagcggcgcgatctcggctcactgcaagctccgcctcccgggttcacgccattctcctgcctcagcctcccgagtagctgggactacaggcgcccgcaaccacgcccggctaattttttgtatttttagtagagatggggtttcaccatgttagtcaggatggtctcgatttcctgaccttgtgatccgcccgcccccgcctcccaaagtgctgggattacaggcgtgagccaccgcgcccggccgtagtttacattttctaaagcgtactctgccagccaagtggcaaacagacttgggcctcttaagagtggaagcaggaggaaacccgaagatcctggagagagactggtggctggtaccagtggagagggagcaaaaaggaaaatacaggatacaatttcaggaaaaatttcataccaatttcctgaggtaatttctgaactcgaacattttcagtgtcaccacattgtgtttcctgctgaatcaagtctacatcacttcggtttttaaagccttccacgatccttccctgaacactgtagttttcactgatggttggctgtttcaaactcccatatgatccatactgtatcattaataagcaagcaaggaataacacaccctctgctattctgtgcagtgtttcaggtttttagttttctctttcaagatagaaaatccctttagagtaggaactcggctggcactttctttcacatcctgcatagcacttagcaaagttctgtacacagggcacatgtggaaattgcttattgattgattaaaagcatatatcactggcatttgtatcttcagtatttctcttgtatgaagaagggtgattatctgtcaatattcattgcatcattgaaccaatgtacaatgcattaatcatcactgaagataaccagatgaggctttattgtaatctccttctattttgctgagataatttcacttgctttagagtttatgaggccataagtggctcccatctgttgatgaacatatttctaagagtcatttagtctcaagtatggaatacttgaggggaagttaaattgtaacttttatattaagtgtcatcttagtaacagaaccaaaattggaagcatgtgttcaattttggtttttcattttcaaagctttaggtcaggcaaagaattaatttcatttgtttacaaagtagattatgcctaataaaatctattttgtttatggtcacattttaatcaatccactgctttagaaaatgagagaattctgattggctaatcattcaacatagtaaattacattattccacatccacagaacactggcctaattgcattatccagtaatgataaaaatattccttttaatacattttgagcaaggcatataccagtgatgaaacagggaagaatcttgtttattccatccttgtttgatgatcgaccacagaatataacataacacttctgtgtataagaattttttcaacattaaggataataaggacaaggtagttttcactggatccttactggtactctgaattttcactatttgtccgcatttcttctccttcccggaaatttgttttctgcgaaaaacaagtgctactttgtcaaataaagcttaaataaaattggtttcaatttatgcataat

SEQ ID NO: 4514 - protein, 131 aa, Homosapiens; identical to SEQ ID NO: 640

SEQ ID NO: 4515 - DNA, 2158 bp, Homosapiens
acattaagtcttcagccttgttgagatagtgaatatttatgccgtatttgagaattaatattagcagaaatgtacaatgtagatttctttttaaaattctaggttactttatggaattgggctcttagagaacaagaaaagactgaagttttacgggaaaacaaatcatgtggtcttcagattctgaaataaggagaaatgcagccatctgaaatggtcatgaaccccaaacaagtcttcctctctgtgctgatatttggagtagctgggctactcctcttcatgtatttgcaagtctggattgaagaacaacatacagggagagtggagaagagaagagaacaaaaagtaacttcaggatggggaccagtgaagtacttgcggcctgtacccagaatcatgagtacagaaaaaatccaggaacatatcaccaaccagaaccccaagtttcacatgcctgaggatgtacgagaaaaaaaggaaaatcttctactcaattctgagagatctactaggctcttaacaaagaccagtcattcacaaggaggggatcaagctttaagtaagtccacagggtcaccaacagagaagttgattgaaaaacgtcaaggagctaagactgtttttaacaagttcagcaacatgaattggccagtggacattcaccctttaaacaaaagtttagtcaaagataataaatggaagaaaactgaggagacccaagagaaacgaaggtctttccttcaggagttttgcaagaaatacggtggggtgagtcatcatcagtcacatctttttcatacagtatccagaatctatgtagaagataaacacaaaatcttatattgtgaggtacctaaggctggctgttccaattggaaaagaattctgatggtactaaatggattggcttcctctgcatacaacatctcccacaatgctgtccactacgggaagcatttgaagaagctagatagctttgacctaaaagggatatatacccgcttaaatacttacaccaaagctgtgtttgttcgtgatcccatggaaagattagtatcagcctttagggacaaatttgaacaccccaatagttattaccatccagtattcggaaaggcaattatcaagaaatatcgaccaaatgcctgtgaagaagcattaattaatggatctggagtcaagttcaaagagtttatccactacttgctggattcccaccgtccagtaggaatggacattcactgggaaaaggtcagcaaactctgctatccgtgtttgatcaactatgattttgtagggaaatttgagactttggaagaagatgccaattactttttacagatgatcggtgctccaaaggagctgaaatttcccaactttaaggataggcactcttccgatgaaagaaccaatgctcaagtcgtgagacagtatttaaaggatctgactagaactgagagacaattaatctatgacttttattacttggactatttaatgtttaattatacaactccatttttgtagtttgcattcattttctaaaaccctgtatatacttaatgatgataagttcaaatcagctgtaatttttctataattctctgtatgacagaaatttaaccaagtgcagttgtcttgatttaatgtagatttttaccaaatagtatgacaccaattggcacaaagttataggaaaatcacctacaggagatgtaaacaacttgagttgctctaaaatgtttggaaaagagctgcttttgcattatgaattatattgttgaagcaataacctagccagctgttgcattagctaaagcagcctcttgcaatggtaggaaaaaaggatctcaaatagcatgagtgtatgtctatatcctgaaatttattgtctaaaatgcatgaatatatttttagcagtctgtggcatattaatcaaactgttgaattgttttcttacaccctggaaatctttctatcaactataatgataaatccattttgaagtgatattttggacttaggcattttactttagattggaaggcattatgtgatttacaatatgagaatatagcagaaaaaccagatgaggctgtggctttttatattcaacagccaataaaaaatgcacaacatgctaagatcaaagcaa

SEQ ID NO: 4516 - protein, 443 aa, Homosapiens
MQPSEMVMNPKQVFLSVLIFGVAGLLLFMYLQVWIEEQHTGRVEKRREQKVTSGWGPVKYLRPVPRIMSTEKIQEHITNQNPKFHMPEDVREKKENLLLNSERSTRLLTKTSHSQGGDQALSKSTGSPTEKLIEKRQGAKTVFNKFSNMNWPVDIHPLNKSLVKDNKWKKTEETQEKRRSFLQEFCKKYGGVSHHQSHLFHTVSRIYVEDKHKILYCEVPKAGCSNWKRILMVLNGLASSAYNISHNAVHYGKHLKKLDSFDLKGIYTRLNTYTKAVFVRDPMERLVSAFRDKFEHPNSYYHPVFGKAIIKKYRPNACEEALINGSGVKFKEFIHYLLDSHRPVGMDIHWEKVSKLCYPCLINYDFVGKFETLEEDANYFLQMIGAPKELKFPNFKDRHSSDERTNAQVVRQYLKDLTRTERQLIYDFYYLDYLMFNYTTPFL

SEQ ID NO: 4517 - DNA, 2264 bp, Homosapiens
gccccagccgggccggacgcgggagggtcagggccagggtgagcgcccgactccgagctgtccccgctcccggcgcggcgctccgctctcagccacctcacggctgccaggagtgcgcgggagtttgccccggagcgcggggaagtttcctccgaagctgcgctcctggaacagcagcacctgcaagcgcccggcagcggcccgcgaggttactttatggaattgggctcttagagaacaagaaaagactgaagttttacgggaaaacaaatcatgtggtcttcagattctgaaataaggagaaatgcagccatctgaaatggtcatgaaccccaaacaagtcttcctctctgtgctgatatttggagtagctgggctactcctcttcatgtatttgcaagtctggattgaagaacaacatacagggagagtggagaagagaagagaacaaaaagtaacttcaggatggggaccagtgaagtacttgcggcctgtacccagaatcatgagtacagaaaaaatccaggaacatatcaccaaccagaaccccaagtttcacatgcctgaggatgtacgagaaaaaaaggaaaatcttctactcaattctgagagatctactaggctcttaacaaagaccagtcattcacaaggaggggatcaagctttaagtaagtccacagggtcaccaacagagaagttgattgaaaaacgtcaaggagctaagactgtttttaacaagttcagcaacatgaattggccagtggacattcaccctttaaacaaaagtttagtcaaagataataaatggaagaaaactgaggagacccaagagaaacgaaggtctttccttcaggagttttgcaagaaatacggtggggtgagtcatcatcagtcacatctttttcatacagtatccagaatctatgtagaagataaacacaaaatcttatattgtgaggtacctaaggctggctgttccaattggaaaagaattctgatggtactaaatggattggcttcctctgcatacaacatctcccacaatgctgtccactacgggaagcatttgaagaagctagatagctttgacctaaaagggatatatacccgcttaaatacttacaccaaagctgtgtttgttcgtgatcccatggaaagattagtatcagcctttagggacaaatttgaacaccccaatagttattaccatccagtattcggaaaggcaattatcaagaaatatcgaccaaatgcctgtgaagaagcattaattaatggatctggagtcaagttcaaagagtttatccactacttgctggattcccaccgtccagtaggaatggacattcactgggaaaaggtcagcaaactctgctatccgtgtttgatcaactatgattttgtagggaaatttgagactttggaagaagatgccaattactttttacagatgatcggtgctccaaaggagctgaaatttcccaactttaaggataggcactcttccgatgaaagaaccaatgctcaagtcgtgagacagtatttaaaggatctgactagaactgagagacaattaatctatgacttttattacttggactatttaatgtttaattatacaactccatttttgtagtttgcattcattttctaaaaccctgtatatacttaatgatgataagttcaaatcagctgtaatttttctataattctctgtatgacagaaatttaaccaagtgcagttgtcttgatttaatgtagatttttaccaaatagtatgacaccaattggcacaaagttataggaaaatcacctacaggagatgtaaacaacttgagttgctctaaaatgtttggaaaagagctgcttttgcattatgaattatattgttgaagcaataacctagccagctgttgcattagctaaagcagcctcttgcaatggtaggaaaaaaggatctcaaatagcatgagtgtatgtctatatcctgaaatttattgtctaaaatgcatgaatatatttttagcagtctgtggcatattaatcaaactgttgaattgttttcttacaccctggaaatctttctatcaactataatgataaatccattttgaagtgatattttggacttaggcattttactttagattggaaggcattatgtgatttacaatatgagaatatagcagaaaaaccagatgaggctgtggctttttatattcaacagccaataaaaaatgcacaacatgctaagatcaaagcaa

SEQ ID NO: 4518 - protein, 443 aa, Homosapiens; identical to SEQ ID NO: 4516

SEQ ID NO: 4519 - DNA, 2226 bp, Homosapiens
gccccagccgggccggacgcgggagggtcagggccagggtgagcgcccgactccgagctgtccccgctcccggcgcggcgctccgctctcagccacctcacggctgccaggagtgcgcgggagtttgccccggagcgcggggaagtttcctccgaagctgcgctcctggaacagcagcacctgcaagcgcccggcagcggcccgcgaggttactttatggaattgggctcttagagaacaagaaaagactgaagttttacgggaaaacaaatcatgtggtcttcagattctgaaataaggagaaatgcagccatctgaaatggtcatgaaccccaaacaagtcttcctctctgtgctgatatttggagtagctgggctactcctcttcatgtatttgcaagtctggattgaagaacaacatacagggagagtggagaagagaagagaacaaaaagtaacttcaggatggggaccagtgaagtacttgcggcctgtacccagaatcaaaccccaagtttcacatgcctgaggatgtacgagaaaaaaaggaaaatcttctactcaattctgagagatctactaggctcttaacaaagaccagtcattcacaaggaggggatcaagctttaagtaagtccacagggtcaccaacagagaagttgattgaaaaacgtcaaggagctaagactgtttttaacaagttcagcaacatgaattggccagtggacattcaccctttaaacaaaagtttagtcaaagataataaatggaagaaaactgaggagacccaagagaaacgaaggtctttccttcaggagttttgcaagaaatacggtggggtgagtcatcatcagtcacatctttttcatacagtatccagaatctatgtagaagataaacacaaaatcttatattgtgaggtacctaaggctggctgttccaattggaaaagaattctgatggtactaaatggattggcttcctctgcatacaacatctcccacaatgctgtccactacgggaagcatttgaagaagctagatagctttgacctaaaagggatatatacccgcttaaatacttacaccaaagctgtgtttgttcgtgatcccatggaaagattagtatcagcctttagggacaaatttgaacaccccaatagttattaccatccagtattcggaaaggcaattatcaagaaatatcgaccaaatgcctgtgaagaagcattaattaatggatctggagtcaagttcaaagagtttatccactacttgctggattcccaccgtccagtaggaatggacattcactgggaaaaggtcagcaaactctgctatccgtgtttgatcaactatgattttgtagggaaatttgagactttggaagaagatgccaattactttttacagatgatcggtgctccaaaggagctgaaatttcccaactttaaggataggcactcttccgatgaaagaaccaatgctcaagtcgtgagacagtatttaaaggatctgactagaactgagagacaattaatctatgacttttattacttggactatttaatgtttaattatacaactccatttttgtagtttgcattcattttctaaaaccctgtatatacttaatgatgataagttcaaatcagctgtaatttttctataattctctgtatgacagaaatttaaccaagtgcagttgtcttgatttaatgtagatttttaccaaatagtatgacaccaattggcacaaagttataggaaaatcacctacaggagatgtaaacaacttgagttgctctaaaatgtttggaaaagagctgcttttgcattatgaattatattgttgaagcaataacctagccagctgttgcattagctaaagcagcctcttgcaatggtaggaaaaaaggatctcaaatagcatgagtgtatgtctatatcctgaaatttattgtctaaaatgcatgaatatatttttagcagtctgtggcatattaatcaaactgttgaattgttttcttacaccctggaaatctttctatcaactataatgataaatccattttgaagtgatattttggacttaggcattttactttagattggaaggcattatgtgatttacaatatgagaatatagcagaaaaaccagatgaggctgtggctttttatattcaacagccaataaaaaatgcacaacatgctaagatcaaagcaa

SEQ ID NO: 4520 - protein, 74 aa, Homosapiens
MQPSEMVMNPKQVFLSVLIFGVAGLLLFMYLQVWIEEQHTGRVEKRREQKVTSGWGPVKYLRPVPRIKPQVSHA

SEQ ID NO: 4521 - DNA, 2014 bp, Homosapiens
acattaagtcttcagccttgttgagatagtgaatatttatgccgtatttgagaattaatattagcagaaatgtacaatgtagatttctttttaaaattctaggttactttatggaattgggctcttagagaacaagaaaagactgaagttttacgggaaaacaaatcatgtggtcttcagattctgaaataaggagaaatgcagccatctgaaatggtcatgaaccccaaacaagtcttcctctctgtgctgatatttggagtagctgggctactcctcttcatgtatttgcaagtctggattgaagaacaacatacagggagagtggagaagagaagagaacaaaaagtaacttcaggatggggaccagtgaagtacttgcggcctgtacccagaatcatgagtacagaaaaaatccaggaacatatcaccaaccagaaccccaagtttcacatgcctgaggatgtacgagaaaaaaaggaaaatcttctactcaattctgagagatctactaggctcttaacaaagaccagtcattcacaaggaggggatcaagctttaagtaagtccacagggtcaccaacagagaagttgattgaaaaacgtcaaggagctaagactgtttttaacaagttcagcaacatgaattggccagtggacattcaccctttaaacaaaagtttagtcaaagataataaatggaagaaaactgaggagacccaagagaaacgaaggtctttccttcaggagttttgcaagaaatacggtggggtgagtcatcatcagtcacatctttttcatacagtatccagaatctatgtagaagataaacacaaaatcttatattgtgaggtacctaaggctggctgttccaattggaaaagaattctgatggtactaaatggattggcttcctctgcatacaacatctcccacaatgctgtccactacgggaagcatttgaagaagctagatagctttgacctaaaagggatatatacccgcttaaatacttacaccaaagctgtgtttgttcgtgatcccatggaaagattagtatcagcctttagggacaaatttgaacaccccaatagttattaccatccagtattcggaaaggcaattatcaagaaatatcgaccaaatgcctgtgaagaagcattaattaatggatctggagtcaagttcaaagagtttatccactacttgctggattcccaccgtccagtaggaatggacattcactgggaaaaggtcagcaaactctgctatccgtgtttgatcaactatgattttgtagggaaatttgagactttggaagaagatgccaattactttttacagatgatcggtgctccaaaggagctgaaatttcccaactttaaggataggcactcttccgatgaaagaaccaatgctcaagtcgtgagacagtatttaaaggatctgactagaactgagagacaattaatctatgacttttattacttggactatttaatgtttaattatacaactccatttttgtagtttgcattcattttctaaaaccctgtatatacttaatgatgataagttcaaatcagctgtaatttttctataattctctgtatgacagaaatttaaccaagtgcagttgtcttgatttaatgtagatttttaccaaatagtatgacaccaattggcacaaagttataggaaaatcacctacaggagatgtaaacaacttgagttgctctaaaatgtttggaaaagagctgcttttgcattatgaattatattgttgaagcaataacctagccagctgttgcattagctaaagcagcctcttgcaatggtaggaaaaaaggatctcaaatagcatgagtgtatgtctatatcctgaaatttattgtctaaaatgcatgaatatatttttagcagtctgtggcatattaatcaaactgttgaattgttttcttacaccctggaaatctttctatcaactataatgataaatccattttgaagtgat

SEQ ID NO: 4522 - protein, 443 aa, Homosapiens; identical to SEQ ID NO: 4516

SEQ ID NO: 4523 - DNA, 2120 bp, Homosapiens
gccccagccgggccggacgcgggagggtcagggccagggtgagcgcccgactccgagctgtccccgctcccggcgcggcgctccgctctcagccacctcacggctgccaggagtgcgcgggagtttgccccggagcgcggggaagtttcctccgaagctgcgctcctggaacagcagcacctgcaagcgcccggcagcggcccgcgaggttactttatggaattgggctcttagagaacaagaaaagactgaagttttacgggaaaacaaatcatgtggtcttcagattctgaaataaggagaaatgcagccatctgaaatggtcatgaaccccaaacaagtcttcctctctgtgctgatatttggagtagctgggctactcctcttcatgtatttgcaagtctggattgaagaacaacatacagggagagtggagaagagaagagaacaaaaagtaacttcaggatggggaccagtgaagtacttgcggcctgtacccagaatcatgagtacagaaaaaatccaggaacatatcaccaaccagaaccccaagtttcacatgcctgaggatgtacgagaaaaaaaggaaaatcttctactcaattctgagagatctactaggctcttaacaaagaccagtcattcacaaggaggggatcaagctttaagtaagtccacagggtcaccaacagagaagttgattgaaaaacgtcaaggagctaagactgtttttaacaagttcagcaacatgaattggccagtggacattcaccctttaaacaaaagtttagtcaaagataataaatggaagaaaactgaggagacccaagagaaacgaaggtctttccttcaggagttttgcaagaaatacggtggggtgagtcatcatcagtcacatctttttcatacagtatccagaatctatgtagaagataaacacaaaatcttatattgtgaggtacctaaggctggctgttccaattggaaaagaattctgatggtactaaatggattggcttcctctgcatacaacatctcccacaatgctgtccactacgggaagcatttgaagaagctagatagctttgacctaaaagggatatatacccgcttaaatacttacaccaaagctgtgtttgttcgtgatcccatggaaagattagtatcagcctttagggacaaatttgaacaccccaatagttattaccatccagtattcggaaaggcaattatcaagaaatatcgaccaaatgcctgtgaagaagcattaattaatggatctggagtcaagttcaaagagtttatccactacttgctggattcccaccgtccagtaggaatggacattcactgggaaaaggtcagcaaactctgctatccgtgtttgatcaactatgattttgtagggaaatttgagactttggaagaagatgccaattactttttacagatgatcggtgctccaaaggagctgaaatttcccaactttaaggataggcactcttccgatgaaagaaccaatgctcaagtcgtgagacagtatttaaaggatctgactagaactgagagacaattaatctatgacttttattacttggactatttaatgtttaattatacaactccatttttgtagtttgcattcattttctaaaaccctgtatatacttaatgatgataagttcaaatcagctgtaatttttctataattctctgtatgacagaaatttaaccaagtgcagttgtcttgatttaatgtagatttttaccaaatagtatgacaccaattggcacaaagttataggaaaatcacctacaggagatgtaaacaacttgagttgctctaaaatgtttggaaaagagctgcttttgcattatgaattatattgttgaagcaataacctagccagctgttgcattagctaaagcagcctcttgcaatggtaggaaaaaaggatctcaaatagcatgagtgtatgtctatatcctgaaatttattgtctaaaatgcatgaatatatttttagcagtctgtggcatattaatcaaactgttgaattgttttcttacaccctggaaatctttctatcaactataatgataaatccattttgaagtgat

SEQ ID NO: 4524 - protein, 443 aa, Homosapiens; identical to SEQ ID NO: 4516

SEQ ID NO: 4525 - DNA, 2082 bp, Homosapiens
gccccagccgggccggacgcgggagggtcagggccagggtgagcgcccgactccgagctgtccccgctcccggcgcggcgctccgctctcagccacctcacggctgccaggagtgcgcgggagtttgccccggagcgcggggaagtttcctccgaagctgcgctcctggaacagcagcacctgcaagcgcccggcagcggcccgcgaggttactttatggaattgggctcttagagaacaagaaaagactgaagttttacgggaaaacaaatcatgtggtcttcagattctgaaataaggagaaatgcagccatctgaaatggtcatgaaccccaaacaagtcttcctctctgtgctgatatttggagtagctgggctactcctcttcatgtatttgcaagtctggattgaagaacaacatacagggagagtggagaagagaagagaacaaaaagtaacttcaggatggggaccagtgaagtacttgcggcctgtacccagaatcaaaccccaagtttcacatgcctgaggatgtacgagaaaaaaaggaaaatcttctactcaattctgagagatctactaggctcttaacaaagaccagtcattcacaaggaggggatcaagctttaagtaagtccacagggtcaccaacagagaagttgattgaaaaacgtcaaggagctaagactgtttttaacaagttcagcaacatgaattggccagtggacattcaccctttaaacaaaagtttagtcaaagataataaatggaagaaaactgaggagacccaagagaaacgaaggtctttccttcaggagttttgcaagaaatacggtggggtgagtcatcatcagtcacatctttttcatacagtatccagaatctatgtagaagataaacacaaaatcttatattgtgaggtacctaaggctggctgttccaattggaaaagaattctgatggtactaaatggattggcttcctctgcatacaacatctcccacaatgctgtccactacgggaagcatttgaagaagctagatagctttgacctaaaagggatatatacccgcttaaatacttacaccaaagctgtgtttgttcgtgatcccatggaaagattagtatcagcctttagggacaaatttgaacaccccaatagttattaccatccagtattcggaaaggcaattatcaagaaatatcgaccaaatgcctgtgaagaagcattaattaatggatctggagtcaagttcaaagagtttatccactacttgctggattcccaccgtccagtaggaatggacattcactgggaaaaggtcagcaaactctgctatccgtgtttgatcaactatgattttgtagggaaatttgagactttggaagaagatgccaattactttttacagatgatcggtgctccaaaggagctgaaatttcccaactttaaggataggcactcttccgatgaaagaaccaatgctcaagtcgtgagacagtatttaaaggatctgactagaactgagagacaattaatctatgacttttattacttggactatttaatgtttaattatacaactccatttttgtagtttgcattcattttctaaaaccctgtatatacttaatgatgataagttcaaatcagctgtaatttttctataattctctgtatgacagaaatttaaccaagtgcagttgtcttgatttaatgtagatttttaccaaatagtatgacaccaattggcacaaagttataggaaaatcacctacaggagatgtaaacaacttgagttgctctaaaatgtttggaaaagagctgcttttgcattatgaattatattgttgaagcaataacctagccagctgttgcattagctaaagcagcctcttgcaatggtaggaaaaaaggatctcaaatagcatgagtgtatgtctatatcctgaaatttattgtctaaaatgcatgaatatatttttagcagtctgtggcatattaatcaaactgttgaattgttttcttacaccctggaaatctttctatcaactataatgataaatccattttgaagtgat

SEQ ID NO: 4526 - protein, 74 aa, Homosapiens; identical to SEQ ID NO: 4520

SEQ ID NO: 4527 - DNA, 1734 bp, Homosapiens
gccccagccgggccggacgcgggagggtcagggccagggtgagcgcccgactccgagctgtccccgctcccggcgcggcgctccgctctcagccacctcacggctgccaggagtgcgcgggagtttgccccggagcgcggggaagtttcctccgaagctgcgctcctggaacagcagcacctgcaagcgcccggcagcggcccgcgaggttactttatggaattgggctcttagagaacaagaaaagactgaagttttacgggaaaacaaatcatgtggtcttcagattctgaaataaggagaaatgcagccatctgaaatggtcatgaaccccaaacaagtcttcctctctgtgctgatatttggagtagctgggctactcctcttcatgtatttgcaagtctggattgaagaacaacatacagggagagtggagaagagaagagaacaaaaagtaacttcaggatggggaccagtgaagtacttgcggcctgtacccagaatcatgagtacagaaaaaatccaggaacatatcaccaaccagaaccccaagtttcacatgcctgaggatgtacgagaaaaaaaggaaaatcttctactcaattctgagagatctactaggctcttaacaaagaccagtcattcacaaggaggggatcaagctttaagtaagtccacagggtcaccaacagagaagttgattgaaaaacgtcaaggagctaagactgtttttaacaagttcagcaacatgaattggccagtggacattcaccctttaaacaaaagtttagtcaaagataataaatggaagaaaactgaggagacccaagagaaacgaaggtctttccttcaggagttttgcaagaaatacggtggggtgagtcatcatcagtcacatctttttcatacagtatccagaatctatgtagaagataaacacaaaatcttatattgtgaggtacctaaggctggctgttccaattggaaaagaattctgatggtactaaatggattggcttcctctgcatacaacatctcccacaatgctgtccactacgggaagcatttgaagaagctagatagctttgacctaaaagggatatatacccgcttaaatacttacaccaaagctgtgtttgttcgtgatcccatggaaagattagtatcagcctttagggacaaatttgaacaccccaatagttattaccatccagtattcggaaaggcaattatcaagaaatatcgaccaaatgcctgtgaagaagcattaattaatggatctggagtcaagttcaaagagtttatccactacttgctggattcccaccgtccagtaggaatggacattcactgggaaaaggtcagcaaactctgctatccgtgtttgatcaactatgattttgtagggaaatttgagactttggaagaagatgccaattactttttacagatgatcggtgctccaaaggagctgaaatttcccaactttaaggataggcactcttccgatgaaagaaccaatgctcaagtcgtgagacagtatttaaaggatctgactagaactgagagacaattaatctatgacttttattacttggactatttaatgtttaattatacaactccatttttgtagtttgcattcattttctaaaaccctgtatatacttaatgatgataagttcaaatcagctgtaatttttctataattctctgtatgacagaaatttaacc

SEQ ID NO: 4528 - protein, 443 aa, Homosapiens; identical to SEQ ID NO: 4516

SEQ ID NO: 4529 - DNA, 1696 bp, Homosapiens
gccccagccgggccggacgcgggagggtcagggccagggtgagcgcccgactccgagctgtccccgctcccggcgcggcgctccgctctcagccacctcacggctgccaggagtgcgcgggagtttgccccggagcgcggggaagtttcctccgaagctgcgctcctggaacagcagcacctgcaagcgcccggcagcggcccgcgaggttactttatggaattgggctcttagagaacaagaaaagactgaagttttacgggaaaacaaatcatgtggtcttcagattctgaaataaggagaaatgcagccatctgaaatggtcatgaaccccaaacaagtcttcctctctgtgctgatatttggagtagctgggctactcctcttcatgtatttgcaagtctggattgaagaacaacatacagggagagtggagaagagaagagaacaaaaagtaacttcaggatggggaccagtgaagtacttgcggcctgtacccagaatcaaaccccaagtttcacatgcctgaggatgtacgagaaaaaaaggaaaatcttctactcaattctgagagatctactaggctcttaacaaagaccagtcattcacaaggaggggatcaagctttaagtaagtccacagggtcaccaacagagaagttgattgaaaaacgtcaaggagctaagactgtttttaacaagttcagcaacatgaattggccagtggacattcaccctttaaacaaaagtttagtcaaagataataaatggaagaaaactgaggagacccaagagaaacgaaggtctttccttcaggagttttgcaagaaatacggtggggtgagtcatcatcagtcacatctttttcatacagtatccagaatctatgtagaagataaacacaaaatcttatattgtgaggtacctaaggctggctgttccaattggaaaagaattctgatggtactaaatggattggcttcctctgcatacaacatctcccacaatgctgtccactacgggaagcatttgaagaagctagatagctttgacctaaaagggatatatacccgcttaaatacttacaccaaagctgtgtttgttcgtgatcccatggaaagattagtatcagcctttagggacaaatttgaacaccccaatagttattaccatccagtattcggaaaggcaattatcaagaaatatcgaccaaatgcctgtgaagaagcattaattaatggatctggagtcaagttcaaagagtttatccactacttgctggattcccaccgtccagtaggaatggacattcactgggaaaaggtcagcaaactctgctatccgtgtttgatcaactatgattttgtagggaaatttgagactttggaagaagatgccaattactttttacagatgatcggtgctccaaaggagctgaaatttcccaactttaaggataggcactcttccgatgaaagaaccaatgctcaagtcgtgagacagtatttaaaggatctgactagaactgagagacaattaatctatgacttttattacttggactatttaatgtttaattatacaactccatttttgtagtttgcattcattttctaaaaccctgtatatacttaatgatgataagttcaaatcagctgtaatttttctataattctctgtatgacagaaatttaacc

SEQ ID NO: 4530 - protein, 74 aa, Homosapiens; identical to SEQ ID NO: 4520

SEQ ID NO: 4531 - DNA, 1519 bp, Homosapiens
agctcattcctttgattctagtctaccagttgccacttctggtccatttgcatataacactggagaagtgttcctttatctttgtgaagcccttaacattcaaggagccactactgcttctatgctgctgaaaaatacaagacactgcctctacctctgcatctgtcctttgctttttgcttggaaactatcacatcaaatcacactgagatcaggagatgagatgaaggatcagctgaggaacagtcatcccaacagtagtgcctggtaagacggtgaggctattcccactcccagcatcctctgttctcttctggaccaacccagttattcaatccctgagctttctcatgtggttctggtaaatccactttttgcttagttcctactgagctctcactggcaaactatcagtagaagaagcctggacaaaactgagttcaatgcttcacaattgctgcgctcttcttctccccagtggaaaaaaaaatgctctctgcaccacatggccgctggccgctgccagaggatggaggaaggggtgatgttggtcattcaagactgtttttcctacctcttcagtgcctctttcaactgtatgaagttaaaaccagcttggcaggctctagagagactgacctctgcagatggtttaaagggagaagctcaagggtccacagttcacagggctgccaatcaggcctgtgcagaaaactcaacagtctaaaagaatatatgaagacagaacctcaacctagaagaaatggacaaattcccagacacatcaaggaattcctagacaaactatcaaaactgaatcatgattagatagaaaatctgaacagatcaatataagtaaagagattaaagcagtaataaactctcccatcaaagaaaagctcaggacctgatggcttcactgctgaattctaccaaacgtttaaagaactaacaccaatgattctcaaactctttttaaaaattgaagatgagagaacacttccaaattcatatcacgaggccagcattaccctgataccaacgccagacaaagacactataagaaaaggcaattatggaccaatatccctgataaacatggatgtaaaaatcctcatcaaaatactagcaaatgaaattcaaccacaaatttaaaaaagcattcaccatgatcgagtgggatttatccctgggatgcaggaagtttcaacatacacaaatccataaacatgatacaccacatcaacaagatgaaggacaaaatctttataatctcaatagatgcaggaaaagcatttaacagaattcagcaccctttcatgatttaaaaaaactcaacaaaatatagaaggactgtaccccaacacaataaagaccagatatgacaaacccacagctaacattctcaacagtgaaaagttaaaagcttttcttctgagatcaggaacaagacaataatgctcactctctcgacttctgttcatcgtaacgttggaagttctagacagagcaattagac

SEQ ID NO: 4532 - protein, 112 aa, Homosapiens
MLSAPHGRWPLPEDGGRGDVGHSRLFFLPLQCLFQLYEVKTSLAGSRETDLCRWFKGRSSRVHSSQGCQSGLCRKLNSLKEYMKTEPQPRRNGQIPRHIKEFLDKLSKLNHD

SEQ ID NO: 4533 - DNA, 1352 bp, Homosapiens
agctcattcctttgattctagtctaccagttgccacttctggtccatttgcatataacactggagaagtgttcctttatctttgtgaagcccttaacattcaaggagccactactgcttctatgctgctgaaaaatacaagacactgcctctacctctgcatctgtcctttgctttttgcttggaaactatcacatcaaatcacactgagatcagttcctactgagctctcactggcaaactatcagtagaagaagcctggacaaaactgagttcaatgcttcacaattgctgcgctcttcttctccccagtggaaaaaaaaatgctctctgcaccacatggccgctggccgctgccagaggatggaggaaggggtgatgttggtcattcaagactgtttttcctacctcttcagtgcctctttcaactgtatgaagttaaaaccagcttggcaggctctagagagactgacctctgcagatggtttaaagggagaagctcaagggtccacagttcacagggctgccaatcaggcctgtgcagaaaactcaacagtctaaaagaatatatgaagacagaacctcaacctagaagaaatggacaaattcccagacacatcaaggaattcctagacaaactatcaaaactgaatcatgattagatagaaaatctgaacagatcaatataagtaaagagattaaagcagtaataaactctcccatcaaagaaaagctcaggacctgatggcttcactgctgaattctaccaaacgtttaaagaactaacaccaatgattctcaaactctttttaaaaattgaagatgagagaacacttccaaattcatatcacgaggccagcattaccctgataccaacgccagacaaagacactataagaaaaggcaattatggaccaatatccctgataaacatggatgtaaaaatcctcatcaaaatactagcaaatgaaattcaaccacaaatttaaaaaagcattcaccatgatcgagtgggatttatccctgggatgcaggaagtttcaacatacacaaatccataaacatgatacaccacatcaacaagatgaaggacaaaatctttataatctcaatagatgcaggaaaagcatttaacagaattcagcaccctttcatgatttaaaaaaactcaacaaaatatagaaggactgtaccccaacacaataaagaccagatatgacaaacccacagctaacattctcaacagtgaaaagttaaaagcttttcttctgagatcaggaacaagacaataatgctcactctctcgacttctgttcatcgtaacgttggaagttctagacagagcaattagac

SEQ ID NO: 4534 - protein, 112 aa, Homosapiens; identical to SEQ ID NO: 4532

SEQ ID NO: 4535 - DNA, 786 bp, Homosapiens
cctctactactgtgcataaaacttgaagagttggaggccatgttcaccagcccagaagatatacgtacacttgggatttttgagttgtgtggtggacggaggggttagtcttaaacactactgatgaacctatgtgattgctgcctgtttcccgccaaataacagggcagtcacggcttatcctttctggctccccttttaccaccttctcctggaatttacctgacctcctcttctcacagcttggcaggctctagagagactgacctctgcagatggtttaaagggagaagctcaagggtccacagttcacagggctgccaatcaggcctgtgcagaaaactcaacagtctaaaagaatatatgaagacagaacctcaacctagaagaaatggacaaattcccagacacatcaaggaattcctagacaaactatcaaaactgaatcatgattagatagaaaatctgaacagatcaatataagtaaagagattaaagcagtaataaactctcccatcaaagaaaagctcaggacctgatggcttcactgctgaattctaccaaacgtttaaagaactaacaccaatgattctcaaactctttttaaaaattgaagatgagagaacacttccaaattcatatcacgaggccagcattaccctgataccaacgccagacaaagacactataagaaaaggcaattatggaccaatatccctgataaacatggatgtaaaaatcctcatcaaaatactagcaaatgaaattcaaccacaaatttaaaaa

SEQ ID NO: 4536 - protein, 65 aa, Homosapiens [sequence omitted]

SEQ ID NO: 4537 - DNA, 438 bp, Homosapiens
tgcagattccagacttgctggcctccatagtaatgtgtcaacaattttggcattgcagaagaccatggagacaacttttttatttctccatcacacaaggactgaagatacaaaaatgagtttttctttcctatggccttggactagctatatacgatagtaattagcaagcaggctctgaattacacgagcccctcccactgactcttgtactttttagctataagaacctaagcacgaacttcgcagagctccagtgcttctgttttgaaaagagataatatttcctatgggatagggttgtctgggggtactaaatgagaactacatacaaagtacttaatggaaggtatgtaggactcaatagaggtagctattaaattgtatgtaagtaacaaatcctgataatgttcaattctgaataaaacttagcaaggt

SEQ ID NO: 4538 - protein, 31 aa, Homosapiens
METTFLFLHHTRTEDTKMSFSFLWPWTSYIR

SEQ ID NO: 4539 - DNA, 2728 bp, Homosapiens; identical to SEQ ID NO: 647

SEQ ID NO: 4540 - protein, 785 aa, Homosapiens; identical to SEQ ID NO: 646

SEQ ID NO: 4541 - DNA, 3766 bp, Homosapiens
tctgggaggcgccgaagtctcagtggctccctgggccggcctccgacagcgctgacagcaggcgcccgccgcccaccatcgtcgccctcttcccctccctcttcggccccggctccggcgcgctctctcctcctctcctgcgcgccctctcgccctctctctggccgcgcgctcccgctggctccggaccctgcgtctcagctgcccgggcgagccggaggggcccctcgcagtgagcagacgcagcgggcccccggcgcccgaggccggggcagggtccccgcgcaccgcggagtgggctgtgattggaggaggagcccgtgccgggcgggcccgagcgggtgtcgagccggttcctccagtctgccccgcgcgcggagctgcgcgcactgggtccccaagagcccgcgggcgtccggcagccgagcgcacgttctttcggatgcacacgcccgggtccctggcgtctgacgccgtggggagggcagcgaggccccaggtacttactacaccattctttggcgaaggctattcagcagtggtgacctcttccaatccaacactctacagattattatctctggactcccagctgacaccctgccggaggcaagagctactaagccaactggaactgtgccttttctcttgtcaaggtttttttcttacacaggaaaaagaaagaaaaaaaaaagatgaagttgggcaaagtggagttctgccattttctgcagctaatagctcttttcctgtgtttttctgggatgagtcaagcagaactctcaaggtccagatcaaagccctatttccaatcagggaggtcccggaccaagcgcagctgggtgtggaatcagttctttgtgctggaggaatacatgggttcagaccccctctatgtaggaaagcttcactctgatgttgataaaggagatggttccatcaaatacatcttgtcaggcgaaggggcaagttccattttcattattgatgagaacactggggatattcatgccaccaagagactggatcgtgaggagcaggcctactacacgctccgagctcaagcgctggataggctcaccaacaaacccgtggagcccgagtcggagtttgtcatcaaaattcaggatatcaacgacaatgaacccaaatttttggatggcccatacacggcaggagttcccgaaatgtctcccgtggggacctcagtggtacaagtgacagcgacggatgctgatgatcctacatatggcaacagtgccagagtggtctacagtattctgcaaggacagccgtacttctcagtggagccaaagacaggagtcatcaagactgcccttccaaacatggatagagaggctaaagaccagtatttgcttgtcattcaggcaaaggatatggttggtcaaaatggaggactgtcaggaactacatcagtcactgtgaccctaactgatgtcaacgataatccacctcgctttcctcgaaggtcttatcaatataacgtcccagagtcattacctgtagcctcagttgtggccagaattaaagctgctgatgcagatattggagctaatgctgaaatggagtacaagattgtggatggtgatggtttgggcatttttaagatttctgttgacaaagaaacccaggaaggaatcattactatacagaaggagctggattttgaagccaaaacaagttacacgctacggatagaagctgcaaataaagatgccgaccctcgctttctgagcttgggtccgttcagtgacacgacaactgtgaagataattgtggaagatgtagatgagccccctgtgttctcttcacccttgtaccctatggaggtgtcggaagctacccaggttgggaatatcattggcactgtagcagctcatgacccagattcttccaatagccctgtgaggtactcaattgacagaaacacagacttggagagatacttcaatattgatgccaacagtggggtcatcacaactgccaagtctttggatcgagagacaaatgctattcacaatatcacagtccttgcaatggagagccagaatccatctcaagtaggaagaggctatgtggccatcactatacttgacatcaatgataacgcccctgaatttgccatggactatgagaccaccgtctgtgaaaatgcccagccggggcaggttatccagaaaatcagtgctgtggataaagatgagccatccaatggacaccagttttacttcagcttaacaacggatgcaacaaataaccacaacttttcattgaaagataacaaagacaacacagcctcaatactgaccaggagaaacggcttccggagacaggaacaatcagtttactatctgccaattttcattgtggacagtggatctccctcacttagcagcaccaacaccctcaccatccgcgtgtgtgactgtgatgctgacggcgtagcccagacctgcaatgcagaggcctatgtcctacctgctggcctcagtacaggagccctgatagccatactcgcctgtgtcttgacattattgggtaggtactgtttccagggcttgctctgaaagagctgtcacaataaccacatgtcacgacttgcctattatcttctccatttggtgaacatatgcagatattctactggatggtgtttgttttgttttgtttttctttgagacggggtctcactctgttgcccaggctggagtgcagtagaatgatctgggctcactgcagcctctgcctcccaggttcaagcaattctcccacctcagcctcccgagtagctgggattacaggggtgcaccaccacacccagctaacttttgtatctttagtagagactgagtttcaccatgttgggcaggctggtcttgaactcctgacctcaggtgatccacccaccttggcctcccaaagtgctgggattacaggagtgagccacagctcctggcctggatggtgttttgctcactaagtaatacaattgttggccacactttccagtggtatatttgaagtataactcagacaaaaagttgtatcaatttcattttcaaagcaacagtgaagataaatggcttatgctttaaattaatgctttttaggattaaaaataatctatcttatcccagttctttgctttagagcactctacagaggagatacactagactggagaatacattttctatattgttttgacaatatgcttattttagaaattatggctttatattctactttttaaagaaattatttgattgctttcttaaattatttgcaaatttgaaatgattacaatttcagcaatgcaaatcttatatttttaaagtattaaatactaacacatttaattgtacatttccatgattagtttattactcggttaaattaaatttataactcatatttgcagtaactcagattttgcagcatccttttaaaaattgggagatgtccaatgtggacactgggtaatgggtttattccaaagaaacatttttcttcacattgtaacttgtaacacgaacacaacaagaacagagtaaacattcaatataccgttccatatggtgaatgttcaataaattttaagtgttactgatggaaaattataagctaagacctagttactaatacattataaatgctgtcgtgaaaatggaggttattgtcttaagtaacttaagctaaacaagtaaatctaaaagaaaataaactatattttgcatagaacttt

SEQ ID NO: 4542 - protein, 630 aa, Homosapiens
MKLGKVEFCHFLQLIALFLCFSGMSQAELSRSRSKPYFQSGRSRTKRSWVWNQFFVLEEYMGSDPLYVGKLHSDVDKGDGSIKYILSGEGASSIFIIDENTGDIHATKRLDREEQAYYTLRAQALDRLTNKPVEPESEFVIKIQDINDNEPKFLDGPYTAGVPEMSPVGTSVVQVTATDADDPTYGNSARVVYSILQGQPYFSVEPKTGVIKTALPNMDREAKDQYLLVIQAKDMVGQNGGLSGTTSVTVTLTDVNDNPPRFPRRSYQYNVPESLPVASVVARIKAADADIGANAEMEYKIVDGDGLGIFKISVDKETQEGIITIQKELDFEAKTSYTLRIEAANKDADPRFLSLGPFSDTTTVKIIVEDVDEPPVFSSPLYPMEVSEATQVGNIIGTVAAHDPDSSNSPVRYSIDRNTDLERYFNIDANSGVITTAKSLDRETNAIHNITVLAMESQNPSQVGRGYVAITILDINDNAPEFAMDYETTVCENAQPGQVIQKISAVDKDEPSNGHQFYFSLTTDATNNHNFSLKDNKDNTASILTRRNGFRRQEQSVYYLPIFIVDSGSPSLSSTNTLTIRVCDCDADGVAQTCNAEAYVLPAGLSTGALIAILACVLTLLGRYCFQGLL

SEQ ID NO: 4543 - DNA, 3097 bp, Homosapiens
tctgggaggcgccgaagtctcagtggctccctgggccggcctccgacagcgctgacagcaggcgcccgccgcccaccatcgtcgccctcttcccctccctcttcggccccggctccggcgcgctctctcctcctctcctgcgcgccctctcgccctctctctggccgcgcgctcccgctggctccggaccctgcgtctcagctgcccgggcgagccggaggggcccctcgcagtgagcagacgcagcgggcccccggcgcccgaggccggggcagggtccccgcgcaccgcggagtgggctgtgattggaggaggagcccgtgccgggcgggcccgagcgggtgtcgagccggttcctccagtctgccccgcgcgcggagctgcgcgcactgggtccccaagagcccgcgggcgtccggcagccgagcgcacgttctttcggatgcacacgcccgggtccctggcgtctgacgccgtggggagggcagcgaggccccaggtacttactacaccattctttggcgaaggctattcagcagtggtgacctcttccaatccaacactctacagattattatctctggactcccagctgacaccctgccggaggcaagagctactaagccaactggaactgtgccttttctcttgtcaaggtttttttcttacacaggaaaaagaaagaaaaaaaaaagatgaagttgggcaaagtggagttctgccattttctgcagctaatagctcttttcctgtgtttttctgggatgagtcaagcagaactctcaaggtccagatcaaagccctatttccaatcagggaggtcccggaccaagcgcagctgggtgtggaatcagttctttgtgctggaggaatacatgggttcagaccccctctatgtaggaaagcttcactctgatgttgataaaggagatggttccatcaaatacatcttgtcaggcgaaggggcaagttccattttcattattgatgagaacactggggatattcatgccaccaagagactggatcgtgaggagcaggcctactacacgctccgagctcaagcgctggataggctcaccaacaaacccgtggagcccgagtcggagtttgtcatcaaaattcaggatatcaacgacaatgaacccaaatttttggatggcccatacacggcaggagttcccgaaatgtctcccgtggggacctcagtggtacaagtgacagcgacggatgctgatgatcctacatatggcaacagtgccagagtggtctacagtattctgcaaggacagccgtacttctcagtggagccaaagacaggagtcatcaagactgcccttccaaacatggatagagaggctaaagaccagtatttgcttgtcattcaggcaaaggatatggttggtcaaaatggaggactgtcaggaactacatcagtcactgtgaccctaactgatgtcaacgataatccacctcgctttcctcgaaggtcttatcaatataacgtcccagagtcattacctgtagcctcagttgtggccagaattaaagctgctgatgcagatattggagctaatgctgaaatggagtacaagattgtggatggtgatggtttgggcatttttaagatttctgttgacaaagaaacccaggaaggaatcattactatacagaaggagctggattttgaagccaaaacaagttacacgctacggatagaagctgcaaataaagatgccgaccctcgctttctgagcttgggtccgttcagtgacacgacaactgtgaagataattgtggaagatgtagatgagccccctgtgttctcttcacccttgtaccctatggaggtgtcggaagctacccaggttgggaatatcattggcactgtagcagctcatgacccagattcttccaatagccctgtgaggtactcaattgacagaaacacagacttggagagatacttcaatattgatgccaacagtggggtcatcacaactgccaagtctttggatcgagagacaaatgctattcacaatatcacagtccttgcaatggagagccagaatccatctcaagtaggaagaggctatgtggccatcactatacttgacatcaatgataacgcccctgaatttgccatggactatgagaccaccgtctgtgaaaatgcccagccggggcaggttatccagaaaatcagtgctgtggataaagatgagccatccaatggacaccagttttacttcagcttaacaacggatgcaacaaataaccacaacttttcattgaaagataacaaagacaacacagcctcaatactgaccaggagaaacggcttccggagacaggaacaatcagtttactatctgccaattttcattgtggacagtggatctccctcacttagcagcaccaacaccctcaccatccgcgtgtgtgactgtgatgctgacggcgtagcccagacctgcaatgcagaggcctatgtcctacctgctggcctcagtacaggagccctgatagccatactcgcctgtgtcttgacattattggtgttgatcctccttatcgtcactatgagaagacggaaaaaagagccccttatttttgacgaagaaagagacatcagagaaaatattgtgagatacgatgacgagggcgggggagaggaggacacggaagcgtttgacatggctgcactgagaaacctcaacgtcatccgagacaccaagacccggagggatgtgactccagaaattcaattcctgagtcgaccagcttttaaaagcatcccagataatgtcatctttagggaatttatttgggaaagattaaaagaagccgatgttgatcctggtgctcctccttatgactccctgcagacatatgcttttgaaggaaatggctcagttgctgaatcactcagctctttagattccatcagctcaaactctgatcagaactatgactacctaagtgactggggacctcgctttaaacgactcgcggacatgtatgggactggccaagagagtttgtactcatagccttggaaccttaattcgaaatgtactgaagaaaaagtaacagc

SEQ ID NO: 4544 - protein, 785 aa, Homosapiens; identical to SEQ ID NO: 646

SEQ ID NO: 4545 - DNA, 831 bp, Homosapiens
ttaaatactgtctctgccatcatgaatcttgctgtcaggtatcaccgccactgaacaggttggagaagaagaacctagtgctgaatccagggtttgtgacaaggctggaagaacatttggtctggctagttaaagtgtggaaagagattcacgctcgtgccaagtatcaagagggatactctgatggactgttcagagccccaatttctgtaactatcacttctcagtgtattgaaagatgctaaacattagaatcaactgaactgactttatcattttattacactatatcaaatcgggttctttgagattcttattctccaaacaatgaaaggaataaatataaactgtgcctgacaaatgaagaaaagatggagatcaatagcttgttaaaataattttgatgtatgctattattataaaatacaacttttgtagaataatgtaggtatgtcactgtcactaaagagtattttatgtattctcatcatttaaggcaaatataacaatatgtattaatttaaattcaataaattttactattaaagttatatctagatagaaatttatgatattcaaaactggctaataaacaggttaagaaaatgatctaatttaagaaaaaattatagttactagcttgttcttttgaatggctagttcaaattattaacaacttcaggaaaaaatttaaattaatgatacaaagcataatattttgcaatgtccttaggtatttgtcctaaatttgatatcatacggtttcatgtttatgaagaactgtttcaactatgtcctaagttggtttgctacagttttgcatatgacatc

SEQ ID NO: 4546 - protein, 35 aa, Homosapiens
MSLGICPKFDIIRFHVYEELFQLCPKLVCYSFAYD

SEQ ID NO: 4547 - DNA, 1262 bp, Homosapiens
aaagtaaaggaacccgagatctgcgcaggggttccctttgccgatttctctcacctcacctttcaaacctaaactcgagcctactgttcaccggcctagcattgctctcgccatggctctcagcgatgctgacgtgcaaaagcaggcagaagaagagttcaacatagagaaaggtcggcttgtgcaaacccaaagactaaagattatggaatattatgagaagaaagagaaacagattgagcagcagaagaaaattcagatgtccaatttgatgaatcaagcgagactcaaagtcctcagagcaagagatgaccttatcacagacctactaaatgaagcaaaacagagactcagcaaggtggtaaaagatacaaccaggtaccaagtgctgctggatggactggttctccagggtttgtaccagttgctggagccccgaatgattgttcgttgcaggaaacaagatttccctctggtaaaggctgcagtgcagaaggcaattcctatgtacaaaattgccaccaaaaacgatgttgatgtccaaattgaccaggagtcctacctgcctgaagacatagctggtggagttgagatctataatggagatcgtaaaataaaggtttccaacaccctggaaagccggctggatctcatagcccagcagatgatgccagaagtccggggagccttgtttggtgcaaatgccaacaggaagtttttggactaagccttcaggaggtggagctcgtcgtcagctctcctgctgtgatgtggaagcttctgatatttgaagaaacacgaatgtctctgtagcttcctcttcactgccccagtattgctctgtatttatcagcgatgcccctctgtcactcatgccttgcctaattgttcacaatggtggaaagcttcatgtaatatgatcaggacccacctccagttcttctgaaagtgtgacagtgtccagccggttctgcagcactaggggagggggcagatggtggttgcatgggcttcctgggtctccactctccgtctggcctaaaggtgatgtatttggtgtttggccctgcagtccccactcttgaggcttaaggcgcatgtggcacaccactccttccagcagtagtcgctttactgttacctgtttaggcctagaagttttccctcatctgtaaatgtgatttaaaatctaagccatgaatatgctttatttattaaaagagttatgcggatttaatgtgatttctagtgtaaggcactac

SEQ ID NO: 4548 - protein, 204 aa, Homosapiens; identical to SEQ ID NO: 650

SEQ ID NO: 4549 - DNA, 1298 bp, Homosapiens
gagaagggtcatgaggatgaactgtgcagtcacctggcaggaaccggaacccgcggttataaagtaaaggaacccgagatctgcgcaggggttccctttgccgatttctctcacctcacctttcaaacctaaactcgagcctactgttcaccggcctagcattgctctcgccatggctctcagcgatgctgacgtgcaaaagcagataaagcatatgatggctttcattgaacaagaagccaatgagaaagcagaagaaatagatgcaaaggcagaagaagagttcaacatagagaaaggtcggcttgtgcaaacccaaagactaaagattatggaatattatgagaagaaagagaaacagattgagcagcagaagaaaattcagatgtccaatttgatgaatcaagcgagactcaaagtcctcagagcaagagatgaccttatcacaggtttgtaccagttgctggagccccgaatgattgttcgttgcaggaaacaagatttccctctggtaaaggctgcagtgcagaaggcaattcctatgtacaaaattgccaccaaaaacgatgttgatgtccaaattgaccaggagtcctacctgcctgaagacatagctggtggagttgagatctataatggagatcgtaaaataaaggtttccaacaccctggaaagccggctggatctcatagcccagcagatgatgccagaagtccggggagccttgtttggtgcaaatgccaacaggaagtttttggactaagccttcaggaggtggagctcgtcgtcagctctcctgctgtgatgtggaagcttctgatatttgaagaaacacgaatgtctctgtagcttcctcttcactgccccagtattgctctgtatttatcagcgatgcccctctgtcactcatgccttgcctaattgttcacaatggtggaaagcttcatgtaatatgatcaggacccacctccagttcttctgaaagtgtgacagtgtccagccggttctgcagcactaggggagggggcagatggtggttgcatgggcttcctgggtctccactctccgtctggcctaaaggtgatgtatttggtgtttggccctgcagtccccactcttgaggcttaaggcgcatgtggcacaccactccttccagcagtagtcgctttactgttacctgtttaggcctagaagttttccctcatctgtaaatgtgatttaaaatctaagccatgaatatgctttatttattaaaagagttatgcggatttaatgtgatttctagtgtaaggcactac

SEQ ID NO: 4550 - protein, 196 aa, Homosapiens; identical to SEQ ID NO: 652

SEQ ID NO: 4551 - DNA, 1403 bp, Homosapiens
ctcttcccattggctgagaagggtcatgaggatgaactgtgcagtcacctggcaggaaccggaacccgcggttataaagtaaaggaacccgagatctgcgcaggggttccctttgccgatttctctcacctcacctttcaaacctaaactcgagcctactgttcaccggcctagcattgctctcgccatggctctcagcgatgctgacgtgcaaaagcagataaagcatatgatggctttcattgaacaagaagccaatgagaaagcagaagaaatagatgcaaaggcagaagaagagttcaacatagagaaaggtcggcttgtgcaaacccaaagactaaagattatggaatattatgagaagaaagagaaacagattgagcagcagaagaaaattcagatgtccaatttgatgaatcaagcgagactcaaagtcctcagagcaagagatgaccttatcacagacctactaaatgaagcaaaacagagactcagcaaggtggtaaaagatacaaccaggtaccaagtgctgctggatggactggttctccagggtttgtaccagttgctggagccccgaatgattgttcgttgcaggaaacaagatttccctctggtaaaggctgcagtgcagaaggcaattcctatgtacaaaattgccaccaaaaacgatgttgatgtccaaattgaccaggagtcctacctgcctgaagacatagctggtggagttgagatctataatggagatcgtaaaataaaggtttccaacaccctggaaagccggctggatctcatagcccagcagatgatgccagaagtccggggagccttgtttggtgcaaatgccaacaggaagtttttggactaagccttcaggaggtggagctcgtcgtcagctctcctgctgtgatgtggaagcttctgatatttgaagaaacacgaatgtctctgtagcttcctcttcactgccccagtattgctctgtatttatcagcgatgcccctctgtcactcatgccttgcctaattgttcacaatggtggaaagcttcatgtaatatgatcaggacccacctccagttcttctgaaagtgtgacagtgtccagccggttctgcagcactaggggagggggcagatggtggttgcatgggcttcctgggtctccactctccgtctggcctaaaggtgatgtatttggtgtttggccctgcagtccccactcttgaggcttaaggcgcatgtggcacaccactccttccagcagtagtcgctttactgttacctgtttaggcctagaagttttccctcatctgtaaatgtgatttaaaatctaagccatgaatatgctttatttattaaaagagttatgcggatttaatgtgatttctagtgtaaggcactac

SEQ ID NO: 4552 - protein, 226 aa, Homosapiens; identical to SEQ ID NO: 654

SEQ ID NO: 4553 - DNA, 780 bp, Homosapiens
aggttgcgcagtctacacaccaagacaagggcattcctctgcgggagtaaagggtaccatgtatctttctcaagtctttgaaaatgattatttcctgtgcttttttttttgcagagctggtggagttgagatctataatggagatcgtaaaataaaggtttccaacaccctggaaagccggctggatctcatagcccagcagatgatgccagaagtccggggagccttgtttggtgcaaatgccaacaggaagtttttggactaagccttcaggaggtggagctcgtcgtcagctctcctgctgtgatgtggaagcttctgatatttgaagaaacacgaatgtctctgtagcttcctcttcactgccccagtattgctctgtatttatcagcgatgcccctctgtcactcatgccttgcctaattgttcacaatggtggaaagcttcatgtaatatgatcaggacccacctccagttcttctgaaagtgtgacagtgtccagccggttctgcagcactaggggagggggcagatggtggttgcatgggcttcctgggtctccactctccgtctggcctaaaggtgatgtatttggtgtttggccctgcagtccccactcttgaggcttaaggcgcatgtggcacaccactccttccagcagtagtcgctttactgttacctgtttaggcctagaagttttccctcatctgtaaatgtgatttaaaatctaagccatgaatatgctttatttattaaaagagttatgcggatttaatgtga

SEQ ID NO: 4554 - protein, 68 aa, Homosapiens
MYLSQVFENDYFLCFFFCRAGGVEIYNGDRKIKVSNTLESRLDLIAQQMMPEVRGALFGANANRKFLD

SEQ ID NO: 4555 - DNA, 1295 bp, Homosapiens
ctcttcccattggctgagaagggtcatgaggatgaactgtgcagtcacctggcaggaaccggaacccgcggttataaagtaaaggaacccgagatctgcgcaggggttccctttgccgatttctctcacctcacctttcaaacctaaactcgagcctactgttcaccggcctagcattgctctcgccatggctctcagcgatgctgacgtgcaaaagcagataaagcatatgatggctttcattgaacaagaagccaatgagaaagcagaagaaatagatgcaaaggcagaagaagagttcaacatagagaaaggtcggcttgtgcaaacccaaagactaaagattatggaatattatgagaagaaagagaaacagattgagcagcagaagaaaattcagatgtccaatttgatgaatcaagcgagactcaaagtcctcagagcaagagatgaccttatcacagacctactaaatgaagcaaaacagagactcagcaaggtggtaaaagatacaaccaggtaccaagtgctgctggatggactggttctccagggtttgtaccagttgctggagccccgaatgattgttcgttgcaggaaacaagatttccctctggtaaaggctgcagtgcagaaggcaattcctatgtacaaaattgccaccaaaaacgatgttgatgtccaaattgaccaggagtcctacctgcctgaagacatatgatgccagaagtccggggagccttgtttggtgcaaatgccaacaggaagtttttggactaagccttcaggaggtggagctcgtcgtcagctctcctgctgtgatgtggaagcttctgatatttgaagaaacacgaatgtctctgtagcttcctcttcactgccccagtattgctctgtatttatcagcgatgcccctctgtcactcatgccttgcctaattgttcacaatggtggaaagcttcatgtaatatgatcaggacccacctccagttcttctgaaagtgtgacagtgtccagccggttctgcagcactaggggagggggcagatggtggttgcatgggcttcctgggtctccactctccgtctggcctaaaggtgatgtatttggtgtttggccctgcagtccccactcttgaggcttaaggcgcatgtggcacaccactccttccagcagtagtcgctttactgttacctgtttaggcctagaagttttccctcatctgtaaatgtgatttaaaatctaagccatgaatatgctttatttattaaaagagttatgcggatttaatgtga

SEQ ID NO: 4556 - protein, 177 aa, Homosapiens
MALSDADVQKQIKHMMAFIEQEANEKAEEIDAKAEEEFNIEKGRLVQTQRLKIMEYYEKKEKQIEQQKKIQMSNLMNQARLKVLRARDDLITDLLNEAKQRLSKVVKDTTRYQVLLDGLVLQGLYQLLEPRMIVRCRKQDFPLVKAAVQKAIPMYKIATKNDVDVQIDQESYLPEDI

SEQ ID NO: 4557 - DNA, 1241 bp, Homosapiens
aaagtaaaggaacccgagatctgcgcaggggttccctttgccgatttctctcacctcacctttcaaacctaaactcgagcctactgttcaccggcctagcattgctctcgccatggctctcagcgatgctgacgtgcaaaagcaggcagaagaagagttcaacatagagaaaggtcggcttgtgcaaacccaaagactaaagattatggaatattatgagaagaaagagaaacagattgagcagcagaagaaaattcagatgtccaatttgatgaatcaagcgagactcaaagtcctcagagcaagagatgaccttatcacagacctactaaatgaagcaaaacagagactcagcaaggtggtaaaagatacaaccaggtaccaagtgctgctggatggactggttctccagggtttgtaccagttgctggagccccgaatgattgttcgttgcaggaaacaagatttccctctggtaaaggctgcagtgcagaaggcaattcctatgtacaaaattgccaccaaaaacgatgttgatgtccaaattgaccaggagtcctacctgcctgaagacatagctggtggagttgagatctataatggagatcgtaaaataaaggtttccaacaccctggaaagccggctggatctcatagcccagcagatgatgccagaagtccggggagccttgtttggtgcaaatgccaacaggaagtttttggactaagccttcaggaggtggagctcgtcgtcagctctcctgctgtgatgtggaagcttctgatatttgaagaaacacgaatgtctctgtagcttcctcttcactgccccagtattgctctgtatttatcagcgatgcccctctgtcactcatgccttgcctaattgttcacaatggtggaaagcttcatgtaatatgatcaggacccacctccagttcttctgaaagtgtgacagtgtccagccggttctgcagcactaggggagggggcagatggtggttgcatgggcttcctgggtctccactctccgtctggcctaaaggtgatgtatttggtgtttggccctgcagtccccactcttgaggcttaaggcgcatgtggcacaccactccttccagcagtagtcgctttactgttacctgtttaggcctagaagttttccctcatctgtaaatgtgatttaaaatctaagccatgaatatgctttatttattaaaagagttatgcggatttaatgtg

SEQ ID NO: 4558 - protein, 204 aa, Homosapiens; identical to SEQ ID NO: 650

SEQ ID NO: 4559 - DNA, 1277 bp, Homosapiens
gagaagggtcatgaggatgaactgtgcagtcacctggcaggaaccggaacccgcggttataaagtaaaggaacccgagatctgcgcaggggttccctttgccgatttctctcacctcacctttcaaacctaaactcgagcctactgttcaccggcctagcattgctctcgccatggctctcagcgatgctgacgtgcaaaagcagataaagcatatgatggctttcattgaacaagaagccaatgagaaagcagaagaaatagatgcaaaggcagaagaagagttcaacatagagaaaggtcggcttgtgcaaacccaaagactaaagattatggaatattatgagaagaaagagaaacagattgagcagcagaagaaaattcagatgtccaatttgatgaatcaagcgagactcaaagtcctcagagcaagagatgaccttatcacaggtttgtaccagttgctggagccccgaatgattgttcgttgcaggaaacaagatttccctctggtaaaggctgcagtgcagaaggcaattcctatgtacaaaattgccaccaaaaacgatgttgatgtccaaattgaccaggagtcctacctgcctgaagacatagctggtggagttgagatctataatggagatcgtaaaataaaggtttccaacaccctggaaagccggctggatctcatagcccagcagatgatgccagaagtccggggagccttgtttggtgcaaatgccaacaggaagtttttggactaagccttcaggaggtggagctcgtcgtcagctctcctgctgtgatgtggaagcttctgatatttgaagaaacacgaatgtctctgtagcttcctcttcactgccccagtattgctctgtatttatcagcgatgcccctctgtcactcatgccttgcctaattgttcacaatggtggaaagcttcatgtaatatgatcaggacccacctccagttcttctgaaagtgtgacagtgtccagccggttctgcagcactaggggagggggcagatggtggttgcatgggcttcctgggtctccactctccgtctggcctaaaggtgatgtatttggtgtttggccctgcagtccccactcttgaggcttaaggcgcatgtggcacaccactccttccagcagtagtcgctttactgttacctgtttaggcctagaagttttccctcatctgtaaatgtgatttaaaatctaagccatgaatatgctttatttattaaaagagttatgcggatttaatgtg

SEQ ID NO: 4560 - protein, 196 aa, Homosapiens; identical to SEQ ID NO: 652

SEQ ID NO: 4561 - DNA, 1299 bp, Homosapiens
ctcttcccattggctgagaagggtcatgaggatgaactgtgcagtcacctggcaggaaccggaacccgcggttataaagtaaaggaacccgagatctgcgcaggggttccctttgccgatttctctcacctcacctttcaaacctaaactcgagcctactgttcaccggcctagcattgctctcgccatggctctcagcgatgctgacgtgcaaaagcagataaagcatatgatggctttcattgaacaagaagccaatgagaaagcagaagaaatagatgcaaaggcagaagaagagttcaacatagagaaaggtcggcttgtgcaaacccaaagactaaagattatggaatattatgagaagaaagagaaacagattgagcagcagaagaaaattcagatgtccaatttgatgaatcaagcgagactcaaagtcctcagagcaagagatgaccttatcacagacctactaaatgaagcaaaacagagactcagcaaggtggtaaaagatacaaccaggtaccaagtgctgctggatggactggttctccagggtttgtaccagttgctggagccccgaatgattgttcgttgcaggaaacaagatttccctctggtaaaggctgcagtgcagaaggcaattcctatgtacaaaattgccaccaaaaacgatgttgatgtccaaattgaccaggagtcctacctgcctgaagacatagctggtggagttgagatctataatggagatcgtaaaataaaggtttccaacaccctggaaagccggctggatctcatagccgagctcgtcgtcagctctcctgctgtgatgtggaagcttctgatatttgaagaaacacgaatgtctctgtagcttcctcttcactgccccagtattgctctgtatttatcagcgatgcccctctgtcactcatgccttgcctaattgttcacaatggtggaaagcttcatgtaatatgatcaggacccacctccagttcttctgaaagtgtgacagtgtccagccggttctgcagcactaggggagggggcagatggtggttgcatgggcttcctgggtctccactctccgtctggcctaaaggtgatgtatttggtgtttggccctgcagtccccactcttgaggcttaaggcgcatgtggcacaccactccttccagcagtagtcgctttactgttacctgtttaggcctagaagttttccctcatctgtaaatgtgatttaaaatctaagccatgaatatgctttatttattaaaagagttatgcggatttaatgtg

SEQ ID NO: 4562 - protein, 227 aa, Homosapiens
MALSDADVQKQIKHMMAFIEQEANEKAEEIDAKAEEEFNIEKGRLVQTQRLKIMEYYEKKEKQIEQQKKIQMSNLMNQARLKVLRARDDLITDLLNEAKQRLSKVVKDTTRYQVLLDGLVLQGLYQLLEPRMIVRCRKQDFPLVKAAVQKAIPMYKIATKNDVDVQIDQESYLPEDIAGGVEIYNGDRKIKVSNTLESRLDLIAELVVSSPAVMWKLLIFEETRMSL

SEQ ID NO: 4563 - DNA, 1382 bp, Homosapiens
ctcttcccattggctgagaagggtcatgaggatgaactgtgcagtcacctggcaggaaccggaacccgcggttataaagtaaaggaacccgagatctgcgcaggggttccctttgccgatttctctcacctcacctttcaaacctaaactcgagcctactgttcaccggcctagcattgctctcgccatggctctcagcgatgctgacgtgcaaaagcagataaagcatatgatggctttcattgaacaagaagccaatgagaaagcagaagaaatagatgcaaaggcagaagaagagttcaacatagagaaaggtcggcttgtgcaaacccaaagactaaagattatggaatattatgagaagaaagagaaacagattgagcagcagaagaaaattcagatgtccaatttgatgaatcaagcgagactcaaagtcctcagagcaagagatgaccttatcacagacctactaaatgaagcaaaacagagactcagcaaggtggtaaaagatacaaccaggtaccaagtgctgctggatggactggttctccagggtttgtaccagttgctggagccccgaatgattgttcgttgcaggaaacaagatttccctctggtaaaggctgcagtgcagaaggcaattcctatgtacaaaattgccaccaaaaacgatgttgatgtccaaattgaccaggagtcctacctgcctgaagacatagctggtggagttgagatctataatggagatcgtaaaataaaggtttccaacaccctggaaagccggctggatctcatagcccagcagatgatgccagaagtccggggagccttgtttggtgcaaatgccaacaggaagtttttggactaagccttcaggaggtggagctcgtcgtcagctctcctgctgtgatgtggaagcttctgatatttgaagaaacacgaatgtctctgtagcttcctcttcactgccccagtattgctctgtatttatcagcgatgcccctctgtcactcatgccttgcctaattgttcacaatggtggaaagcttcatgtaatatgatcaggacccacctccagttcttctgaaagtgtgacagtgtccagccggttctgcagcactaggggagggggcagatggtggttgcatgggcttcctgggtctccactctccgtctggcctaaaggtgatgtatttggtgtttggccctgcagtccccactcttgaggcttaaggcgcatgtggcacaccactccttccagcagtagtcgctttactgttacctgtttaggcctagaagttttccctcatctgtaaatgtgatttaaaatctaagccatgaatatgctttatttattaaaagagttatgcggatttaatgtg

SEQ ID NO: 4564 - protein, 226 aa, Homosapiens; identical to SEQ ID NO: 654

SEQ ID NO: 4565 - DNA, 935 bp, Homosapiens
aaagtaaaggaacccgagatctgcgcaggggttccctttgccgatttctctcacctcacctttcaaacctaaactcgagcctactgttcaccggcctagcattgctctcgccatggctctcagcgatgctgacgtgcaaaagcaggcagaagaagagttcaacatagagaaaggtcggcttgtgcaaacccaaagactaaagattatggaatattatgagaagaaagagaaacagattgagcagcagaagaaaattcagatgtccaatttgatgaatcaagcgagactcaaagtcctcagagcaagagatgaccttatcacagacctactaaatgaagcaaaacagagactcagcaaggtggtaaaagatacaaccaggtaccaagtgctgctggatggactggttctccagggtttgtaccagttgctggagccccgaatgattgttcgttgcaggaaacaagatttccctctggtaaaggctgcagtgcagaaggcaattcctatgtacaaaattgccaccaaaaacgatgttgatgtccaaattgaccaggagtcctacctgcctgaagacatagctggtggagttgagatctataatggagatcgtaaaataaaggtttccaacaccctggaaagccggctggatctcatagcccagcagatgatgccagaagtccggggagccttgtttggtgcaaatgccaacaggaagtttttggactaagccttcaggaggtggagctcgtcgtcagctctcctgctgtgatgtggaagcttctgatatttgaagaaacacgaatgtctctgtagcttcctcttcactgccccagtattgctctgtatttatcagcgatgcccctctgtcactcatgccttgcctaattgttcacaatggtggaaagcttcatgtaatatgatcaggacccacctcc

SEQ ID NO: 4566 - protein, 204 aa, Homosapiens; identical to SEQ ID NO: 650

SEQ ID NO: 4567 - DNA, 971 bp, Homosapiens
gagaagggtcatgaggatgaactgtgcagtcacctggcaggaaccggaacccgcggttataaagtaaaggaacccgagatctgcgcaggggttccctttgccgatttctctcacctcacctttcaaacctaaactcgagcctactgttcaccggcctagcattgctctcgccatggctctcagcgatgctgacgtgcaaaagcagataaagcatatgatggctttcattgaacaagaagccaatgagaaagcagaagaaatagatgcaaaggcagaagaagagttcaacatagagaaaggtcggcttgtgcaaacccaaagactaaagattatggaatattatgagaagaaagagaaacagattgagcagcagaagaaaattcagatgtccaatttgatgaatcaagcgagactcaaagtcctcagagcaagagatgaccttatcacaggtttgtaccagttgctggagccccgaatgattgttcgttgcaggaaacaagatttccctctggtaaaggctgcagtgcagaaggcaattcctatgtacaaaattgccaccaaaaacgatgttgatgtccaaattgaccaggagtcctacctgcctgaagacatagctggtggagttgagatctataatggagatcgtaaaataaaggtttccaacaccctggaaagccggctggatctcatagcccagcagatgatgccagaagtccggggagccttgtttggtgcaaatgccaacaggaagtttttggactaagccttcaggaggtggagctcgtcgtcagctctcctgctgtgatgtggaagcttctgatatttgaagaaacacgaatgtctctgtagcttcctcttcactgccccagtattgctctgtatttatcagcgatgcccctctgtcactcatgccttgcctaattgttcacaatggtggaaagcttcatgtaatatgatcaggacccacctcc

SEQ ID NO: 4568 - protein, 196 aa, Homosapiens; identical to SEQ ID NO: 652

SEQ ID NO: 4569 - DNA, 1076 bp, Homosapiens
ctcttcccattggctgagaagggtcatgaggatgaactgtgcagtcacctggcaggaaccggaacccgcggttataaagtaaaggaacccgagatctgcgcaggggttccctttgccgatttctctcacctcacctttcaaacctaaactcgagcctactgttcaccggcctagcattgctctcgccatggctctcagcgatgctgacgtgcaaaagcagataaagcatatgatggctttcattgaacaagaagccaatgagaaagcagaagaaatagatgcaaaggcagaagaagagttcaacatagagaaaggtcggcttgtgcaaacccaaagactaaagattatggaatattatgagaagaaagagaaacagattgagcagcagaagaaaattcagatgtccaatttgatgaatcaagcgagactcaaagtcctcagagcaagagatgaccttatcacagacctactaaatgaagcaaaacagagactcagcaaggtggtaaaagatacaaccaggtaccaagtgctgctggatggactggttctccagggtttgtaccagttgctggagccccgaatgattgttcgttgcaggaaacaagatttccctctggtaaaggctgcagtgcagaaggcaattcctatgtacaaaattgccaccaaaaacgatgttgatgtccaaattgaccaggagtcctacctgcctgaagacatagctggtggagttgagatctataatggagatcgtaaaataaaggtttccaacaccctggaaagccggctggatctcatagcccagcagatgatgccagaagtccggggagccttgtttggtgcaaatgccaacaggaagtttttggactaagccttcaggaggtggagctcgtcgtcagctctcctgctgtgatgtggaagcttctgatatttgaagaaacacgaatgtctctgtagcttcctcttcactgccccagtattgctctgtatttatcagcgatgcccctctgtcactcatgccttgcctaattgttcacaatggtggaaagcttcatgtaatatgatcaggacccacctcc

SEQ ID NO: 4570 - protein, 226 aa, Homosapiens; identical to SEQ ID NO: 654

SEQ ID NO: 4571 - DNA, 506 bp, Homosapiens
gagaagggtcatgaggatgaactgtgcagtcacctggcaggaaccggaacccgcggttataaagtaaaggaacccgagatctgcgcaggggttccctttgccgatttctctcacctcacctttcaaacctaaactcgagcctactgttcaccggcctagcattgctctcgccatggctctcagcgatgctgacgtgcaaaagcagataaagcatatgatggctttcattgaacaagaagccaatgagaaagcagaagaaatagatgcaaaggcagaagaagagttcaacatagagaaaggtcggcttgtgcaaacccaaagactaaagattatggaatattatgagaagaaagagaaacagattgagcagcagaagaaaattcagatgtccaatttgatgaatcaagcgagactcaaagtcctcagagcaagagatgaccttatcacaagctggtggagttgagatctataatggagatcgtaaaataaaggtttccaacaccctg

SEQ ID NO: 4572 - protein, 96 aa, Homosapiens
MALSDADVQKQIKHMMAFIEQEANEKAEEIDAKAEEEFNIEKGRLVQTQRLKIMEYYEKKEKQIEQQKKIQMSNLMNQARLKVLRARDDLITSWWS

SEQ ID NO: 4573 - DNA, 821 bp, Homosapiens
gagaagggtcatgaggatgaactgtgcagtcacctggcaggaaccggaacccgcggttataaagtaaaggaacccgagatctgcgcaggggttccctttgccgatttctctcacctcacctttcaaacctaaactcgagcctactgttcaccggcctagcattgctctcgccatggctctcagcgatgctgacgtgcaaaagcagataaagcatatgatggctttcattgaacaagaagccaatgagaaagcagaagaaatagatgcaaaggcagaagaagagttcaacatagagaaaggtcggcttgtgcaaacccaaagactaaagattatggaatattatgagaagaaagagaaacagattgagcagcagaagaaaattcagatgtccaatttgatgaatcaagcgagactcaaagtcctcagagcaagagatgaccttatcacagacctactaaatgaagcaaaacagagactcagcaaggtggtaaaagatacaaccaggtaccaagtgctgctggatggactggttctccaggtaccctcatagaccagatctactgttgatagccacagttctgagaaaatttagaatgcctattagagaccagctctattttttcctgctttctcatttctctagtttttttcctttcaccctttttttttcttttagcttttttactttcactcttgaccatatctaaaatgtgtgctgcataggaaaatagtaaatctgtctgcttggataagacttccaggcctactactcaattatgtagtcttacatgacttaagggtcaaatttgcttgcaatggct

SEQ ID NO: 4574 - protein, 125 aa, Homosapiens
MALSDADVQKQIKHMMAFIEQEANEKAEEIDAKAEEEFNIEKGRLVQTQRLKIMEYYEKKEKQIEQQKKIQMSNLMNQARLKVLRARDDLITDLLNEAKQRLSKVVKDTTRYQVLLDGLVLQVPS

SEQ ID NO: 4575 - DNA, 1373 bp, Homosapiens
tcctaaactgggatcttgggtaggaggaagaaaagataaggagttcctctatctgaaattagtcgggctgttttgaggagtactggttagataccttccgatactcctccaaagaactctcggattcaagtaaacaaacatccattaatacaagttaagtatgttccaggcgctgtgtgttccaggtactgttaacaaaagcgggttactagttaagacttccttcatgccctggcgcctctgctcagccagttcccttcgcctaggaggacctctctacaccaccccgctatattccctccccggaattccttcccaaccttcaaggaccatctgccccaactagtggcgaacatcgaggctgtcgtgactgtgtagatacttatttgacctgctcccttggcaaacacttgaaacgcaatacatgtttgtggaactgaacatagcctgtgcatgcagcaaggcttctttccctggaatcgcctgcccttcctccaacacagcgaccagccggtcagaatcccaacccctcgactccggaaatgatctgagagacggaacttccgaacgtcgcaatcagatttgggcgggctaggagggtttgggtcttcaggtcacatctggacggagagacctccggggcctccgttggtcggtccttccgctccggataccgttccggatgtcaggttttacacatccataagtagacctttttggagcctcaccagccaattcaatggcgtcctcttctactgtgcctctgggatttcactatgaaacaaagtatgttgttctcagctacttgggactcctctctcaagagaagctgcaagagcaacatctttcctcaccccaaggggttcaactagatatagcttcacaatctctggatcaagaaattttattaaaagttaaaactgaaattgaagaagagctaaaatctctggacaaagaaatttctgaagccttcaccagcacaggctttgaccgtcacacttctccagtgttcagccctgccaatccagaaagctcaatggaagactgcttggcccatcttggagaaaaagtgtcccaggaactgaaagagcctctccataaagcattgcaaatgctcctgagccagccagtgacatatcaggcatttcgggaatgtacactggagaccacagttcatgccagcggctggaataagattttggtgcctctggttttgctacgacaaatgcttttggaattgacaagacgtggtcaagaacctttgagcgcactgctgcagtttggcgtgacatacctggaggactattcggcagagtacatcattcagcaaggtggctgggtatgagctgttatatattaaaaatattttcttg

SEQ ID NO: 4576 - protein, 201 aa, Homosapiens
MASSSTVPLGFHYETKYVVLSYLGLLSQEKLQEQHLSSPQGVQLDIASQSLDQEILLKVKTEIEEELKSLDKEISEAFTSTGFDRHTSPVFSPANPESSMEDCLAHLGEKVSQELKEPLHKALQMLLSQPVTYQAFRECTLETTVHASGWNKILVPLVLLRQMLLELTRRGQEPLSALLQFGVTYLEDYSAEYIIQQGGWV

SEQ ID NO: 4577 - DNA, 2269 bp, Homosapiens
agatttgggcgggctaggagggtttgggtcttcaggtcacatctggacggagagacctccggggcctccgttggtcggtccttccgctccggataccgttccggatgtcaggtagttcaggtcccgccccgacgccggccgtgacgaaggcacgccggggtgacctcaccctccaacatggcggcggcggtagattagggccgcgggtcggagcactcaccgccgctgggggaccctgtcggaagcaactgccgccgccgcctctttcatctcttctggggcaggggccagggccaggttttacacatccataagtagacctttttggagcctcaccagccaattcaatggcgtcctcttctactgtgcctctgggatttcactatgaaacaaagtatgttgttctcagctacttgggactcctctctcaagagaagctgcaagagcaacatctttcctcaccccaaggggttcaactagatatagcttcacaatctctggatcaagaaattttattaaaagttaaaactgaaattgaagaagagctaaaatctctggacaaagaaatttctgaagccttcaccagcacaggctttgaccgtcacacttctccagtgttcagccctgccaatccagaaagctcaatggaagactgcttggcccatcttggagaaaaagtgtcccaggaactgaaagagcctctccataaagcattgcaaatgctcctgagccaattttggtgcctctggttttgctacgacaaatgcttttggaattgacaagacgtggtcaagaacctttgagcgcactgctgcagtttggcgtgacatacctggaggactattcggcagagtacatcattcagcaaggtggctgggtatgagctgttatatattaaaaatattttcttgaaaaaaaattaggtttgttgtttttcttaagagatgggttcttgctgtgttacccgggctggagtgcagtgtctaattgctggcactatcatggcaggcttcggtctcaaactcctgggctcaagtgatcctgcctcaggtcctgaatagccaagagcacaggctgggactataggtgcccaccactgtgccgtgctctatcccgtactttttgatatgtaattattattattattcagttggttcagttgtttataaattttccttatatgttctttgacccttgaattacttagaaatgtattttttaatttctaaatacttacaggtttaaaaattttgttttcaattactaatttaattctgtttcatcagaaagcacgaccatcgtggcattgaaacttgagttatagcctactatcatgatcaatttaaaaaatatatatatagggctgggtgcagtggtgcacatctgtaatcccagtgctttgggaggctgaggtgggtgaatcacctgaggtcaggagttcaagaccagcctggtcaacatgacaaaaccccatctgtacaaaaaaatacaaaaaattaactgggcttggtggcatgtgcctgtaatcccagctactcaggaggccaaggcaggagaatcacttgaacccgggaggcagaggttgcagtgagccaagatggcaccactgcattccagcctgggcaacagagcaacaacaacaacaacaacaaaatatatatatacacacacacacacacatatgtatatgtatatacacacatgtatatttttatgtatgtttcagaacatgtattctctaatggttggtgcagaagtctgtacgtgtccatttacatttaatcagtcttaataatacgtattttaaatctttcagtcatttccaattattttgtctaattatttactaagagagacatgttctatttgctactatggtggtagattttccattttccctttagttctgtcaattgtaggtgactaaaagttgtaattattgacccctggacatttatgcggactctctttctttctttgggcctagaaatggtttttaagtttatttgttgtaatttgcccaacagtcagtgattctgtagagagagtacttttcataaagtatactactcattattgttttttagccactatgcatctgagggtttgagttaatttttaaaatatgtaaatttaattactatggatactaatatcgaacatcctaggtttacgtgcttggtaaatgcttactgaataaaatcctgaacatttgtcttaggaaaataaaaatattttttgagctgttcttaaaaataagaattgcgac

SEQ ID NO: 4578 - protein, 143 aa, Homosapiens
MASSSTVPLGFHYETKYVVLSYLGLLSQEKLQEQHLSSPQGVQLDIASQSLDQEILLKVKTEIEEELKSLDKEISEAFTSTGFDRHTSPVFSPANPESSMEDCLAHLGEKVSQELKEPLHKALQMLLSQFWCLWFCYDKCFWN

SEQ ID NO: 4579 - DNA, 2339 bp, Homosapiens
agatttgggcgggctaggagggtttgggtcttcaggtcacatctggacggagagacctccggggcctccgttggtcggtccttccgctccggataccgttccggatgtcaggtagttcaggtcccgccccgacgccggccgtgacgaaggcacgccggggtgacctcaccctccaacatggcggcggcggtagattagggccgcgggtcggagcactcaccgccgctgggggaccctgtcggaagcaactgccgccgccgcctctttcatctcttctggggcaggggccagggccaggttttacacatccataagtagacctttttggagcctcaccagccaattcaatggcgtcctcttctactgtgcctctgggatttcactatgaaacaaagtatgttgttctcagctacttgggactcctctctcaagagaagctgcaagagcaacatctttcctcaccccaaggggttcaactagatatagcttcacaatctctggatcaagaaattttattaaaagttaaaactgaaattgaagaagagctaaaatctctggacaaagaaatttctgaagccttcaccagcacaggctttgaccgtcacacttctccagtgttcagccctgccaatccagaaagctcaatggaagactgcttggcccatcttggagaaaaagtgtcccaggaactgaaagagcctctccataaagcattgcaaatgctcctgagccagccagtgacatatcaggcatttcgggaatgtacactggagaccacagttcatgccagcggctggaataagattttggtgcctctggttttgctacgacaaatgcttttggaattgacaagacgtggtcaagaacctttgagcgcactgctgcagtttggcgtgacatacctggaggactattcggcagagtacatcattcagcaaggtggctgggtatgagctgttatatattaaaaatattttcttgaaaaaaaattaggtttgttgtttttcttaagagatgggttcttgctgtgttacccgggctggagtgcagtgtctaattgctggcactatcatggcaggcttcggtctcaaactcctgggctcaagtgatcctgcctcaggtcctgaatagccaagagcacaggctgggactataggtgcccaccactgtgccgtgctctatcccgtactttttgatatgtaattattattattattcagttggttcagttgtttataaattttccttatatgttctttgacccttgaattacttagaaatgtattttttaatttctaaatacttacaggtttaaaaattttgttttcaattactaatttaattctgtttcatcagaaagcacgaccatcgtggcattgaaacttgagttatagcctactatcatgatcaatttaaaaaatatatatatagggctgggtgcagtggtgcacatctgtaatcccagtgctttgggaggctgaggtgggtgaatcacctgaggtcaggagttcaagaccagcctggtcaacatgacaaaaccccatctgtacaaaaaaatacaaaaaattaactgggcttggtggcatgtgcctgtaatcccagctactcaggaggccaaggcaggagaatcacttgaacccgggaggcagaggttgcagtgagccaagatggcaccactgcattccagcctgggcaacagagcaacaacaacaacaacaacaaaatatatatatacacacacacacacacatatgtatatgtatatacacacatgtatatttttatgtatgtttcagaacatgtattctctaatggttggtgcagaagtctgtacgtgtccatttacatttaatcagtcttaataatacgtattttaaatctttcagtcatttccaattattttgtctaattatttactaagagagacatgttctatttgctactatggtggtagattttccattttccctttagttctgtcaattgtaggtgactaaaagttgtaattattgacccctggacatttatgcggactctctttctttctttgggcctagaaatggtttttaagtttatttgttgtaatttgcccaacagtcagtgattctgtagagagagtacttttcataaagtatactactcattattgttttttagccactatgcatctgagggtttgagttaatttttaaaatatgtaaatttaattactatggatactaatatcgaacatcctaggtttacgtgcttggtaaatgcttactgaataaaatcctgaacatttgtcttaggaaaataaaaatattttttgagctgttcttaaaaataagaattgcgac

SEQ ID NO: 4580 - protein, 201 aa, Homosapiens; identical to SEQ ID NO: 4576

SEQ ID NO: 4581 - DNA, 3250 bp, Homosapiens
agatttgggcgggctaggagggtttgggtcttcaggtcacatctggacggagagacctccggggcctccgttggtcggtccttccgctccggataccgttccggatgtcaggtagttcaggtcccgccccgacgccggccgtgacgaaggcacgccggggtgacctcaccctccaacatggcggcggcggtagattagggccgcgggtcggagcactcaccgccgctgggggaccctgtcggaagcaactgccgccgccgcctctttcatctcttctggggcaggggccagggccaggttttacacatccataagtagacctttttggagcctcaccagccaattcaatggcgtcctcttctactgtgcctctgggatttcactatgaaacaaagtatgttgttctcagctacttgggactcctctctcaagagaagctgcaagagcaacatctttcctcaccccaaggggttcaactagatatagcttcacaatctctggatcaagaaattttattaaaagttaaaactgaaattgaagaagagctaaaatctctggacaaagaaatttctgaaggccagtgacatatcaggcatttcgggaatgtacactggagaccacagttcatgccagcggctggaataagattttggtgcctctggttttgctacgacaaatgcttttggaattgacaagacgtggtcaagaacctttgagcgcactgctgcagtttggcgtgacatacctggaggactattcggcagagtacatcattcagcaaggtggctggggcactgtgtttagtcttgagtcagaggaggaggaataccctggaatcactgcagaagatagcaatgacatttacatcctgcccagcgacaactctggacaagtcagtcccccagagtctccaactgtgaccacttcctggcagtctgagagcttacctgtgtcactgtcagctagccagagttggcacacagaaagcctgccagtgtcactaggccctgagtcctggcagcagattgcaatggatcctgaagaagtgaaaagcttagacagcaacggagctggagagaagagtgagaacaactcctctaattctgacattgtgcacgtggagaaagaagaggtgcccgagggcatggaagaggctgctgtggcttctgtggtcttgccagcgcgggagctgcaagaggcacttcctgaagccccagctcccttgcttccacatatcactgccacctccctgctggggacaagggaacctgacacagaagtgatcacagttgagaaatccagccctgctacatctctgtttgtagaacttgatgaagaagaggtgaaagcagcaacaactgaacctactgaagtggaggaggtggtccccgcactggaacccacagaaacgctgctgagtgagaaggagataaacgcaagggaagagagccttgtggaagagctgtcccctgccagcgagaagaagcccgtgccgccgtctgagggcaagtctagactgtcccccgccggtgagatgaagcccatgccgctgtctgagggcaagtctatactgctgtttggaggggctgctgctgttgccatcctggcagtggccatcggggtagccctggctctgagaaagaaataggaggcttttcagaagagaaagacagaaggatgtaaggttggagttgtattggctggaatttgaacctccagcagctgtctggacatttgtggaacactctgggataattggggacttctgctcaacatggcagtggcatgttaggcatgttagggcttgaggtggggcattcacattcatctgactgtaaatcccaagggcctccgctcatgctaaattgagaatcttaggggtaaagcaccccctccaggaccgggtttctcagccttggcactagtgctgttctgaccattctctgtgttggggctgtcctgtgtgtggtgggctccacccactagatgccagtggcaccccctcccagagatgacaaacgaaaatgtctctagacattgccaaatgtcccgtgtgaacatcccctattgagacccactgctttagcgagagagggtttacttaggaagaattgggatagaaattcccagctgagagaacttagctgtgggctcctcagctactgacttcttagctcttaatccccttagaatttcatctttctcgatgagcaggctctgcacccactctttttttgccccccgccctcatcctggagtgtgagggtgctcgcccgtactctcagctgcctctcagggactgcactgttcctcttcacccccaggttcctgctaagatcccacgggcgagggcttgctctggactcagtctgtcaagtccccgaagcttcctgcagctccaccttgtaaaaatgctgcctttgggaatcttcgaaatatgtacacagagaaaatcacatgaaggagacctggggtccccacttgtgagtgcaactgcaagtaactctggctagagagacacatgtgtcttgtgtcaaggcaggaggataacctggatgaccttctgaggtctcttcagcccttttcgctagtggtcacccaccaccatggttacttgccagcaacatctctattgctggatggtccctgtctataaccttgggctagtatattttttccaatatgggaccttagtcttactactgatgagttctatgggtctcttgctagggggtaaggatttttattcttgggcttatagagccagttagatcataattcttatgaaatagagagtgtcctaaatatcactgaaataaaaagtaggaaaaagaagcttgaattttaagactgaggctgctctgcagattctagtttggctttcagagttcaagagtggtggcatcttcacctgaattcttcaatgccagggtaataaaccaaaatagtcctaatcagtatatgctagttgagcatcggcataattttctttcctctggctgatcccagccctaaaggaagggtagacccgtgtctttccagccctaaaggaagggtagacccgtgtctttccagccctaaaggaagggcagacccgtgtctttccatgcccgagggccacgacgtcactatgcagggcacacgtggcttggtttaaaaaggtcatcttagatttatcttagtaaatgtaataaattattttttagatcttgaaatttataataaaaatactttacctaccctgatcacc

SEQ ID NO: 4582 - protein, 323 aa, Homosapiens
MLLELTRRGQEPLSALLQFGVTYLEDYSAEYIIQQGGWGTVFSLESEEEEYPGITAEDSNDIYILPSDNSGQVSPPESPTVTTSWQSESLPVSLSASQSWHTESLPVSLGPESWQQIAMDPEEVKSLDSNGAGEKSENNSSNSDIVHVEKEEVPEGMEEAAVASVVLPARELQEALPEAPAPLLPHITATSLLGTREPDTEVITVEKSSPATSLFVELDEEEVKAATTEPTEVEEVVPALEPTETLLSEKEINAREESLVEELSPASEKKPVPPSEGKSRLSPAGEMKPMPLSEGKSILLFGGAAAVAILAVAIGVALALRKK

SEQ ID NO: 4583 - DNA, 3407 bp, Homosapiens
agatttgggcgggctaggagggtttgggtcttcaggtcacatctggacggagagacctccggggcctccgttggtcggtccttccgctccggataccgttccggatgtcaggtagttcaggtcccgccccgacgccggccgtgacgaaggcacgccggggtgacctcaccctccaacatggcggcggcggtagattagggccgcgggtcggagcactcaccgccgctgggggaccctgtcggaagcaactgccgccgccgcctctttcatctcttctggggcaggggccagggccaggttttacacatccataagtagacctttttggagcctcaccagccaattcaatggcgtcctcttctactgtgcctctgggatttcactatgaaacaaagtatgttgttctcagctacttgggactcctctctcaagagaagctgcaagagcaacatctttcctcaccccaaggggttcaactagatatagcttcacaatctctggatcaagaaattttattaaaagttaaaactgaaattgaagaagagctaaaatctctggacaaagaaatttctgaagccttcaccagcacaggctttgaccgtcacacttctccagtgttcagccctgccaatccagaaagctcaatggaagactgcttggcccatcttggagaaaaagtgtcccaggaactgaaagagcctctccataaagcattgcaaatgctcctgagccagccagtgacatatcaggcatttcgggaatgtacactggagaccacagttcatgccagcggctggaataagattttggtgcctctggttttgctacgacaaatgcttttggaattgacaagacgtggtcaagaacctttgagcgcactgctgcagtttggcgtgacatacctggaggactattcggcagagtacatcattcagcaaggtggctggggcactgtgtttagtcttgagtcagaggaggaggaataccctggaatcactgcagaagatagcaatgacatttacatcctgcccagcgacaactctggacaagtcagtcccccagagtctccaactgtgaccacttcctggcagtctgagagcttacctgtgtcactgtcagctagccagagttggcacacagaaagcctgccagtgtcactaggccctgagtcctggcagcagattgcaatggatcctgaagaagtgaaaagcttagacagcaacggagctggagagaagagtgagaacaactcctctaattctgacattgtgcacgtggagaaagaagaggtgcccgagggcatggaagaggctgctgtggcttctgtggtcttgccagcgcgggagctgcaagaggcacttcctgaagccccagctcccttgcttccacatatcactgccacctccctgctggggacaagggaacctgacacagaagtgatcacagttgagaaatccagccctgctacatctctgtttgtagaacttgatgaagaagaggtgaaagcagcaacaactgaacctactgaagtggaggaggtggtccccgcactggaacccacagaaacgctgctgagtgagaaggagataaacgcaagggaagagagccttgtggaagagctgtcccctgccagcgagaagaagcccgtgccgccgtctgagggcaagtctagactgtcccccgccggtgagatgaagcccatgccgctgtctgagggcaagtctatactgctgtttggaggggctgctgctgttgccatcctggcagtggccatcggggtagccctggctctgagaaagaaataggaggcttttcagaagagaaagacagaaggatgtaaggttggagttgtattggctggaatttgaacctccagcagctgtctggacatttgtggaacactctgggataattggggacttctgctcaacatggcagtggcatgttaggcatgttagggcttgaggtggggcattcacattcatctgactgtaaatcccaagggcctccgctcatgctaaattgagaatcttaggggtaaagcaccccctccaggaccgggtttctcagccttggcactagtgctgttctgaccattctctgtgttggggctgtcctgtgtgtggtgggctccacccactagatgccagtggcaccccctcccagagatgacaaacgaaaatgtctctagacattgccaaatgtcccgtgtgaacatcccctattgagacccactgctttagcgagagagggtttacttaggaagaattgggatagaaattcccagctgagagaacttagctgtgggctcctcagctactgacttcttagctcttaatccccttagaatttcatctttctcgatgagcaggctctgcacccactctttttttgccccccgccctcatcctggagtgtgagggtgctcgcccgtactctcagctgcctctcagggactgcactgttcctcttcacccccaggttcctgctaagatcccacgggcgagggcttgctctggactcagtctgtcaagtccccgaagcttcctgcagctccaccttgtaaaaatgctgcctttgggaatcttcgaaatatgtacacagagaaaatcacatgaaggagacctggggtccccacttgtgagtgcaactgcaagtaactctggctagagagacacatgtgtcttgtgtcaaggcaggaggataacctggatgaccttctgaggtctcttcagcccttttcgctagtggtcacccaccaccatggttacttgccagcaacatctctattgctggatggtccctgtctataaccttgggctagtatattttttccaatatgggaccttagtcttactactgatgagttctatgggtctcttgctagggggtaaggatttttattcttgggcttatagagccagttagatcataattcttatgaaatagagagtgtcctaaatatcactgaaataaaaagtaggaaaaagaagcttgaattttaagactgaggctgctctgcagattctagtttggctttcagagttcaagagtggtggcatcttcacctgaattcttcaatgccagggtaataaaccaaaatagtcctaatcagtatatgctagttgagcatcggcataattttctttcctctggctgatcccagccctaaaggaagggtagacccgtgtctttccagccctaaaggaagggtagacccgtgtctttccagccctaaaggaagggcagacccgtgtctttccatgcccgagggccacgacgtcactatgcagggcacacgtggcttggtttaaaaaggtcatcttagatttatcttagtaaatgtaataaattattttttagatcttgaaatttataataaaaatactttacctaccctgatcacc

SEQ ID NO: 4584 - protein, 485 aa, Homosapiens; identical to SEQ ID NO: 656

SEQ ID NO: 4585 - DNA, 3180 bp, Homosapiens
agatttgggcgggctaggagggtttgggtcttcaggtcacatctggacggagagacctccggggcctccgttggtcggtccttccgctccggataccgttccggatgtcaggtagttcaggtcccgccccgacgccggccgtgacgaaggcacgccggggtgacctcaccctccaacatggcggcggcggtagattagggccgcgggtcggagcactcaccgccgctgggggaccctgtcggaagcaactgccgccgccgcctctttcatctcttctggggcaggggccagggccaggttttacacatccataagtagacctttttggagcctcaccagccaattcaatggcgtcctcttctactgtgcctctgggatttcactatgaaacaaagtatgttgttctcagctacttgggactcctctctcaagagaagctgcaagagcaacatctttcctcaccccaaggggttcaactagatatagcttcacaatctctggatcaagaaattttattaaaagttaaaactgaaattgaagaagagctaaaatctctggacaaagaaatttctgaagattttggtgcctctggttttgctacgacaaatgcttttggaattgacaagacgtggtcaagaacctttgagcgcactgctgcagtttggcgtgacatacctggaggactattcggcagagtacatcattcagcaaggtggctggggcactgtgtttagtcttgagtcagaggaggaggaataccctggaatcactgcagaagatagcaatgacatttacatcctgcccagcgacaactctggacaagtcagtcccccagagtctccaactgtgaccacttcctggcagtctgagagcttacctgtgtcactgtcagctagccagagttggcacacagaaagcctgccagtgtcactaggccctgagtcctggcagcagattgcaatggatcctgaagaagtgaaaagcttagacagcaacggagctggagagaagagtgagaacaactcctctaattctgacattgtgcacgtggagaaagaagaggtgcccgagggcatggaagaggctgctgtggcttctgtggtcttgccagcgcgggagctgcaagaggcacttcctgaagccccagctcccttgcttccacatatcactgccacctccctgctggggacaagggaacctgacacagaagtgatcacagttgagaaatccagccctgctacatctctgtttgtagaacttgatgaagaagaggtgaaagcagcaacaactgaacctactgaagtggaggaggtggtccccgcactggaacccacagaaacgctgctgagtgagaaggagataaacgcaagggaagagagccttgtggaagagctgtcccctgccagcgagaagaagcccgtgccgccgtctgagggcaagtctagactgtcccccgccggtgagatgaagcccatgccgctgtctgagggcaagtctatactgctgtttggaggggctgctgctgttgccatcctggcagtggccatcggggtagccctggctctgagaaagaaataggaggcttttcagaagagaaagacagaaggatgtaaggttggagttgtattggctggaatttgaacctccagcagctgtctggacatttgtggaacactctgggataattggggacttctgctcaacatggcagtggcatgttaggcatgttagggcttgaggtggggcattcacattcatctgactgtaaatcccaagggcctccgctcatgctaaattgagaatcttaggggtaaagcaccccctccaggaccgggtttctcagccttggcactagtgctgttctgaccattctctgtgttggggctgtcctgtgtgtggtgggctccacccactagatgccagtggcaccccctcccagagatgacaaacgaaaatgtctctagacattgccaaatgtcccgtgtgaacatcccctattgagacccactgctttagcgagagagggtttacttaggaagaattgggatagaaattcccagctgagagaacttagctgtgggctcctcagctactgacttcttagctcttaatccccttagaatttcatctttctcgatgagcaggctctgcacccactctttttttgccccccgccctcatcctggagtgtgagggtgctcgcccgtactctcagctgcctctcagggactgcactgttcctcttcacccccaggttcctgctaagatcccacgggcgagggcttgctctggactcagtctgtcaagtccccgaagcttcctgcagctccaccttgtaaaaatgctgcctttgggaatcttcgaaatatgtacacagagaaaatcacatgaaggagacctggggtccccacttgtgagtgcaactgcaagtaactctggctagagagacacatgtgtcttgtgtcaaggcaggaggataacctggatgaccttctgaggtctcttcagcccttttcgctagtggtcacccaccaccatggttacttgccagcaacatctctattgctggatggtccctgtctataaccttgggctagtatattttttccaatatgggaccttagtcttactactgatgagttctatgggtctcttgctagggggtaaggatttttattcttgggcttatagagccagttagatcataattcttatgaaatagagagtgtcctaaatatcactgaaataaaaagtaggaaaaagaagcttgaattttaagactgaggctgctctgcagattctagtttggctttcagagttcaagagtggtggcatcttcacctgaattcttcaatgccagggtaataaaccaaaatagtcctaatcagtatatgctagttgagcatcggcataattttctttcctctggctgatcccagccctaaaggaagggtagacccgtgtctttccagccctaaaggaagggtagacccgtgtctttccagccctaaaggaagggcagacccgtgtctttccatgcccgagggccacgacgtcactatgcagggcacacgtggcttggtttaaaaaggtcatcttagatttatcttagtaaatgtaataaattattttttagatcttgaaatttataataaaaatactttacctaccctgatcacc

SEQ ID NO: 4586 - protein, 323 aa, Homosapiens; identical to SEQ ID NO: 4582

SEQ ID NO: 4587 - DNA, 3193 bp, Homosapiens
agatttgggcgggctaggagggtttgggtcttcaggtcacatctggacggagagacctccggggcctccgttggtcggtccttccgctccggataccgttccggatgtcaggtagttcaggtcccgccccgacgccggccgtgacgaaggcacgccggggtgacctcaccctccaacatggcggcggcggtagattagggccgcgggtcggagcactcaccgccgctgggggaccctgtcggaagcaactgccgccgccgcctctttcatctcttctggggcaggggccagggccaggttttacacatccataagtagacctttttggagcctcaccagccaattcaatggcgtcctcttctactgtgcctctgggatttcactatgaaacaaagtatgttgttctcagctacttgggactcctctctcaagagaagctgcaagagcaacatctttcctcaccccaaggggttcaactagatatagcttcacaatctctggatcaagaaattttattaaaagttaaaactgaaattgaagaagagctaaaatctctggacaaagaaatttctgaagccttcaccagcacaggctttgaccgtcacacttctccagtgttcagccctgccaatccagaaagctcaatggaagactgcttggcccatcttggagaaaaagtgtcccaggaactgaaagagcctctccataaagcattgcaaatgctcctgagccaggcactgtgtttagtcttgagtcagaggaggaggaataccctggaatcactgcagaagatagcaatgacatttacatcctgcccagcgacaactctggacaagtcagtcccccagagtctccaactgtgaccacttcctggcagtctgagagcttacctgtgtcactgtcagctagccagagttggcacacagaaagcctgccagtgtcactaggccctgagtcctggcagcagattgcaatggatcctgaagaagtgaaaagcttagacagcaacggagctggagagaagagtgagaacaactcctctaattctgacattgtgcacgtggagaaagaagaggtgcccgagggcatggaagaggctgctgtggcttctgtggtcttgccagcgcgggagctgcaagaggcacttcctgaagccccagctcccttgcttccacatatcactgccacctccctgctggggacaagggaacctgacacagaagtgatcacagttgagaaatccagccctgctacatctctgtttgtagaacttgatgaagaagaggtgaaagcagcaacaactgaacctactgaagtggaggaggtggtccccgcactggaacccacagaaacgctgctgagtgagaaggagataaacgcaagggaagagagccttgtggaagagctgtcccctgccagcgagaagaagcccgtgccgccgtctgagggcaagtctagactgtcccccgccggtgagatgaagcccatgccgctgtctgagggcaagtctatactgctgtttggaggggctgctgctgttgccatcctggcagtggccatcggggtagccctggctctgagaaagaaataggaggcttttcagaagagaaagacagaaggatgtaaggttggagttgtattggctggaatttgaacctccagcagctgtctggacatttgtggaacactctgggataattggggacttctgctcaacatggcagtggcatgttaggcatgttagggcttgaggtggggcattcacattcatctgactgtaaatcccaagggcctccgctcatgctaaattgagaatcttaggggtaaagcaccccctccaggaccgggtttctcagccttggcactagtgctgttctgaccattctctgtgttggggctgtcctgtgtgtggtgggctccacccactagatgccagtggcaccccctcccagagatgacaaacgaaaatgtctctagacattgccaaatgtcccgtgtgaacatcccctattgagacccactgctttagcgagagagggtttacttaggaagaattgggatagaaattcccagctgagagaacttagctgtgggctcctcagctactgacttcttagctcttaatccccttagaatttcatctttctcgatgagcaggctctgcacccactctttttttgccccccgccctcatcctggagtgtgagggtgctcgcccgtactctcagctgcctctcagggactgcactgttcctcttcacccccaggttcctgctaagatcccacgggcgagggcttgctctggactcagtctgtcaagtccccgaagcttcctgcagctccaccttgtaaaaatgctgcctttgggaatcttcgaaatatgtacacagagaaaatcacatgaaggagacctggggtccccacttgtgagtgcaactgcaagtaactctggctagagagacacatgtgtcttgtgtcaaggcaggaggataacctggatgaccttctgaggtctcttcagcccttttcgctagtggtcacccaccaccatggttacttgccagcaacatctctattgctggatggtccctgtctataaccttgggctagtatattttttccaatatgggaccttagtcttactactgatgagttctatgggtctcttgctagggggtaaggatttttattcttgggcttatagagccagttagatcataattcttatgaaatagagagtgtcctaaatatcactgaaataaaaagtaggaaaaagaagcttgaattttaagactgaggctgctctgcagattctagtttggctttcagagttcaagagtggtggcatcttcacctgaattcttcaatgccagggtaataaaccaaaatagtcctaatcagtatatgctagttgagcatcggcataattttctttcctctggctgatcccagccctaaaggaagggtagacccgtgtctttccagccctaaaggaagggtagacccgtgtctttccagccctaaaggaagggcagacccgtgtctttccatgcccgagggccacgacgtcactatgcagggcacacgtggcttggtttaaaaaggtcatcttagatttatcttagtaaatgtaataaattattttttagatcttgaaatttataataaaaatactttacctaccctgatcacc

SEQ ID NO: 4588 - protein, 171 aa, Homosapiens
MASSSTVPLGFHYETKYVVLSYLGLLSQEKLQEQHLSSPQGVQLDIASQSLDQEILLKVKTEIEEELKSLDKEISEAFTSTGFDRHTSPVFSPANPESSMEDCLAHLGEKVSQELKEPLHKALQMLLSQALCLVLSQRRRNTLESLQKIAMTFTSCPATTLDKSVPQSLQL

SEQ ID NO: 4589 - DNA, 3270 bp, Homosapiens
agatttgggcgggctaggagggtttgggtcttcaggtcacatctggacggagagacctccggggcctccgttggtcggtccttccgctccggataccgttccggatgtcaggtagttcaggtcccgccccgacgccggccgtgacgaaggcacgccggggtgacctcaccctccaacatggcggcggcggtagattagggccgcgggtcggagcactcaccgccgctgggggaccctgtcggaagcaactgccgccgccgcctctttcatctcttctggggcaggggccagggccaggttttacacatccataagtagacctttttggagcctcaccagccaattcaatggcgtcctcttctactgtgcctctgggatttcactatgaaacaaagtatgttgttctcagctacttgggactcctctctcaagagaagctgcaagagcaacatctttcctcaccccaaggggttcaactagatatagcttcacaatctctggatcaagaaattttattaaaagttaaaactgaaattgaagaagagctaaaatctctggacaaagaaatttctgaagattttggtgcctctggttttgctacgacaaatgcttttggaattgacaagacgtggtcaagaacctttgagcgcactgctgcagtttggcgtgacatacctggaggactattcggcagagtacatcattcagcaaggtggctggggcactgtgtttagtcttgagtcagaggaggaggaataccctggaatcactgcagaagatagcaatgacatttacatcctgcccagcgacaactctggacaagtcagtcccccagagtctccaactgtgaccacttcctggcagtctgagagcttacctgtgtcactgtcagctagccagagttggcacacagaaagcctgccagtgtcactaggccctgagtcctggcagcagattgcaatggatcctgaagaagtgaaaagcttagacagcaacggagctggagagaagagtgagaacaactcctctaattctgacattgtgcacgtggagaaagaagaggtgcccgagggcatggaagaggctgctgtggcttctgtggtcttgccagcgcgggagctgcaagaggcacttcctgaagccccagctcccttgcttccacatatcactgccacctccctgctggggacaagggaacctgacacagaagtgatcacagttgagaaatccagccctgctacatctctgtttgtagaacttgatgaagaagaggtgaaagcagcaacaactgaacctactgaagtggaggaggtggtccccgcactggaacccacagaaacgctgctgagtgagaaggagataaacgcaagggaagagagccttgtggaagagctgtcccctgccagcgagaagaagcccgtgccgccgtctgagggcaagtctagactgtcccccgccggtgagatgaagcccatgccgctgtctgagggcaagtctatactgctgtttggaggggctgctgctgttgccatcctggcagtggccatcggggtagccctggctctgagaaagaaataggaggcttttcagaagagaaagacagaaggatgtaaggttggagttgtattggctggaatttgaacctccagcagctgtctggacatttgtggaacactctgggataattggggacttctgctcaacatggcagtggcatgttaggcatgttagggcttgaggtggggcattcacattcatctgactgtaaatcccaagggcctccgctcatgctaaattgagaatcttaggggtaaagcaccccctccaggaccgggtttctcagccttggcactagtgctgttctgaccattctctgtgttggggctgtcctgtgtgtggtgggctccacccactagatgccagtggcaccccctcccagagatgacaaacgaaaatgtctctagacattgccaaatgtcccgtgtgaacatcccctattgagacccactgctttagcgagagagggtttacttaggaagaattgggatagaaattcccagctgagagaacttagctgtgggctcctcagctactgacttcttagctcttaatccccttagaatttcatctttctcgatgagcaggctctgcacccactctttttttgccccccgccctcatcctggagtgtgagggtgctcgcccgtactctcagctgcctctcagggactgcactgttcctcttcacccccaggttcctgctaagatcccacgggcgagggcttgctctggactcagtctgtcaagtccccgaagcttcctgcagctccaccttgtaaaaatgctgcctttgggaatcttcgaaatatgtacacagagaaaatcacatgaaggagacctggggtccccacttgtgagtgcaactgcaagtaactctggctagagagacacatgtgtcttgtgtcaaggcaggaggataacctggatgaccttctgaggtctcttcagcccttttcgctagtggtcacccaccaccatggttacttgccagcaacatctctattgctggatggtccctgtctataaccttgggctagtatattttttccaatatgggaccttagtcttactactgatgagttctatgggtctcttgctagggggtaaggatttttattcttgggcttatagagccagttagatcataattcttatgaaatagagagtgtcctaaatatcactgaaataaaaagtaggaaaaagaagcttgaattttaagactgaggctgctctgcagattctagtttggctttcagagttcaagagtggtggcatcttcacctgaattcttcaatgccagggtaataaaccaaaatagtcctaatcagtatatgctagttgagcatcggcataattttctttcctctggctgatcccagccctaaaggaagggtagacccgtgtctttccagccctaaaggaagggtagacccgtgtctttccagccctaaaggaagggcagacccgtgtctttccatgcccgagggccacgacgtcactatgcagggcacacgtggcttggtttaaaaaggtcatcttagatttatcttagtaaatgtaataaattattttttagatcttgaaatttataataaaaatactttacctaccctgatcaccaaaacctgatgttttaaatgtgctttctttttgaaatttatgttttcaaataaaatctccctaaagcaatatttaaaaattggtcaaaac

SEQ ID NO: 4590 - protein, 323 aa, Homosapiens; identical to SEQ ID NO: 4582

SEQ ID NO: 4591 - DNA, 3283 bp, Homosapiens
agatttgggcgggctaggagggtttgggtcttcaggtcacatctggacggagagacctccggggcctccgttggtcggtccttccgctccggataccgttccggatgtcaggtagttcaggtcccgccccgacgccggccgtgacgaaggcacgccggggtgacctcaccctccaacatggcggcggcggtagattagggccgcgggtcggagcactcaccgccgctgggggaccctgtcggaagcaactgccgccgccgcctctttcatctcttctggggcaggggccagggccaggttttacacatccataagtagacctttttggagcctcaccagccaattcaatggcgtcctcttctactgtgcctctgggatttcactatgaaacaaagtatgttgttctcagctacttgggactcctctctcaagagaagctgcaagagcaacatctttcctcaccccaaggggttcaactagatatagcttcacaatctctggatcaagaaattttattaaaagttaaaactgaaattgaagaagagctaaaatctctggacaaagaaatttctgaagccttcaccagcacaggctttgaccgtcacacttctccagtgttcagccctgccaatccagaaagctcaatggaagactgcttggcccatcttggagaaaaagtgtcccaggaactgaaagagcctctccataaagcattgcaaatgctcctgagccaggcactgtgtttagtcttgagtcagaggaggaggaataccctggaatcactgcagaagatagcaatgacatttacatcctgcccagcgacaactctggacaagtcagtcccccagagtctccaactgtgaccacttcctggcagtctgagagcttacctgtgtcactgtcagctagccagagttggcacacagaaagcctgccagtgtcactaggccctgagtcctggcagcagattgcaatggatcctgaagaagtgaaaagcttagacagcaacggagctggagagaagagtgagaacaactcctctaattctgacattgtgcacgtggagaaagaagaggtgcccgagggcatggaagaggctgctgtggcttctgtggtcttgccagcgcgggagctgcaagaggcacttcctgaagccccagctcccttgcttccacatatcactgccacctccctgctggggacaagggaacctgacacagaagtgatcacagttgagaaatccagccctgctacatctctgtttgtagaacttgatgaagaagaggtgaaagcagcaacaactgaacctactgaagtggaggaggtggtccccgcactggaacccacagaaacgctgctgagtgagaaggagataaacgcaagggaagagagccttgtggaagagctgtcccctgccagcgagaagaagcccgtgccgccgtctgagggcaagtctagactgtcccccgccggtgagatgaagcccatgccgctgtctgagggcaagtctatactgctgtttggaggggctgctgctgttgccatcctggcagtggccatcggggtagccctggctctgagaaagaaataggaggcttttcagaagagaaagacagaaggatgtaaggttggagttgtattggctggaatttgaacctccagcagctgtctggacatttgtggaacactctgggataattggggacttctgctcaacatggcagtggcatgttaggcatgttagggcttgaggtggggcattcacattcatctgactgtaaatcccaagggcctccgctcatgctaaattgagaatcttaggggtaaagcaccccctccaggaccgggtttctcagccttggcactagtgctgttctgaccattctctgtgttggggctgtcctgtgtgtggtgggctccacccactagatgccagtggcaccccctcccagagatgacaaacgaaaatgtctctagacattgccaaatgtcccgtgtgaacatcccctattgagacccactgctttagcgagagagggtttacttaggaagaattgggatagaaattcccagctgagagaacttagctgtgggctcctcagctactgacttcttagctcttaatccccttagaatttcatctttctcgatgagcaggctctgcacccactctttttttgccccccgccctcatcctggagtgtgagggtgctcgcccgtactctcagctgcctctcagggactgcactgttcctcttcacccccaggttcctgctaagatcccacgggcgagggcttgctctggactcagtctgtcaagtccccgaagcttcctgcagctccaccttgtaaaaatgctgcctttgggaatcttcgaaatatgtacacagagaaaatcacatgaaggagacctggggtccccacttgtgagtgcaactgcaagtaactctggctagagagacacatgtgtcttgtgtcaaggcaggaggataacctggatgaccttctgaggtctcttcagcccttttcgctagtggtcacccaccaccatggttacttgccagcaacatctctattgctggatggtccctgtctataaccttgggctagtatattttttccaatatgggaccttagtcttactactgatgagttctatgggtctcttgctagggggtaaggatttttattcttgggcttatagagccagttagatcataattcttatgaaatagagagtgtcctaaatatcactgaaataaaaagtaggaaaaagaagcttgaattttaagactgaggctgctctgcagattctagtttggctttcagagttcaagagtggtggcatcttcacctgaattcttcaatgccagggtaataaaccaaaatagtcctaatcagtatatgctagttgagcatcggcataattttctttcctctggctgatcccagccctaaaggaagggtagacccgtgtctttccagccctaaaggaagggtagacccgtgtctttccagccctaaaggaagggcagacccgtgtctttccatgcccgagggccacgacgtcactatgcagggcacacgtggcttggtttaaaaaggtcatcttagatttatcttagtaaatgtaataaattattttttagatcttgaaatttataataaaaatactttacctaccctgatcaccaaaacctgatgttttaaatgtgctttctttttgaaatttatgttttcaaataaaatctccctaaagcaatatttaaaaattggtcaaaac

SEQ ID NO: 4592 - protein, 171 aa, Homosapiens; identical to SEQ ID NO: 4588

SEQ ID NO: 4593 - DNA, 3340 bp, Homosapiens
agatttgggcgggctaggagggtttgggtcttcaggtcacatctggacggagagacctccggggcctccgttggtcggtccttccgctccggataccgttccggatgtcaggtagttcaggtcccgccccgacgccggccgtgacgaaggcacgccggggtgacctcaccctccaacatggcggcggcggtagattagggccgcgggtcggagcactcaccgccgctgggggaccctgtcggaagcaactgccgccgccgcctctttcatctcttctggggcaggggccagggccaggttttacacatccataagtagacctttttggagcctcaccagccaattcaatggcgtcctcttctactgtgcctctgggatttcactatgaaacaaagtatgttgttctcagctacttgggactcctctctcaagagaagctgcaagagcaacatctttcctcaccccaaggggttcaactagatatagcttcacaatctctggatcaagaaattttattaaaagttaaaactgaaattgaagaagagctaaaatctctggacaaagaaatttctgaaggccagtgacatatcaggcatttcgggaatgtacactggagaccacagttcatgccagcggctggaataagattttggtgcctctggttttgctacgacaaatgcttttggaattgacaagacgtggtcaagaacctttgagcgcactgctgcagtttggcgtgacatacctggaggactattcggcagagtacatcattcagcaaggtggctggggcactgtgtttagtcttgagtcagaggaggaggaataccctggaatcactgcagaagatagcaatgacatttacatcctgcccagcgacaactctggacaagtcagtcccccagagtctccaactgtgaccacttcctggcagtctgagagcttacctgtgtcactgtcagctagccagagttggcacacagaaagcctgccagtgtcactaggccctgagtcctggcagcagattgcaatggatcctgaagaagtgaaaagcttagacagcaacggagctggagagaagagtgagaacaactcctctaattctgacattgtgcacgtggagaaagaagaggtgcccgagggcatggaagaggctgctgtggcttctgtggtcttgccagcgcgggagctgcaagaggcacttcctgaagccccagctcccttgcttccacatatcactgccacctccctgctggggacaagggaacctgacacagaagtgatcacagttgagaaatccagccctgctacatctctgtttgtagaacttgatgaagaagaggtgaaagcagcaacaactgaacctactgaagtggaggaggtggtccccgcactggaacccacagaaacgctgctgagtgagaaggagataaacgcaagggaagagagccttgtggaagagctgtcccctgccagcgagaagaagcccgtgccgccgtctgagggcaagtctagactgtcccccgccggtgagatgaagcccatgccgctgtctgagggcaagtctatactgctgtttggaggggctgctgctgttgccatcctggcagtggccatcggggtagccctggctctgagaaagaaataggaggcttttcagaagagaaagacagaaggatgtaaggttggagttgtattggctggaatttgaacctccagcagctgtctggacatttgtggaacactctgggataattggggacttctgctcaacatggcagtggcatgttaggcatgttagggcttgaggtggggcattcacattcatctgactgtaaatcccaagggcctccgctcatgctaaattgagaatcttaggggtaaagcaccccctccaggaccgggtttctcagccttggcactagtgctgttctgaccattctctgtgttggggctgtcctgtgtgtggtgggctccacccactagatgccagtggcaccccctcccagagatgacaaacgaaaatgtctctagacattgccaaatgtcccgtgtgaacatcccctattgagacccactgctttagcgagagagggtttacttaggaagaattgggatagaaattcccagctgagagaacttagctgtgggctcctcagctactgacttcttagctcttaatccccttagaatttcatctttctcgatgagcaggctctgcacccactctttttttgccccccgccctcatcctggagtgtgagggtgctcgcccgtactctcagctgcctctcagggactgcactgttcctcttcacccccaggttcctgctaagatcccacgggcgagggcttgctctggactcagtctgtcaagtccccgaagcttcctgcagctccaccttgtaaaaatgctgcctttgggaatcttcgaaatatgtacacagagaaaatcacatgaaggagacctggggtccccacttgtgagtgcaactgcaagtaactctggctagagagacacatgtgtcttgtgtcaaggcaggaggataacctggatgaccttctgaggtctcttcagcccttttcgctagtggtcacccaccaccatggttacttgccagcaacatctctattgctggatggtccctgtctataaccttgggctagtatattttttccaatatgggaccttagtcttactactgatgagttctatgggtctcttgctagggggtaaggatttttattcttgggcttatagagccagttagatcataattcttatgaaatagagagtgtcctaaatatcactgaaataaaaagtaggaaaaagaagcttgaattttaagactgaggctgctctgcagattctagtttggctttcagagttcaagagtggtggcatcttcacctgaattcttcaatgccagggtaataaaccaaaatagtcctaatcagtatatgctagttgagcatcggcataattttctttcctctggctgatcccagccctaaaggaagggtagacccgtgtctttccagccctaaaggaagggtagacccgtgtctttccagccctaaaggaagggcagacccgtgtctttccatgcccgagggccacgacgtcactatgcagggcacacgtggcttggtttaaaaaggtcatcttagatttatcttagtaaatgtaataaattattttttagatcttgaaatttataataaaaatactttacctaccctgatcaccaaaacctgatgttttaaatgtgctttctttttgaaatttatgttttcaaataaaatctccctaaagcaatatttaaaaattggtcaaaac

SEQ ID NO: 4594 - protein, 323 aa, Homosapiens; identical to SEQ ID NO: 4582

SEQ ID NO: 4595 - DNA, 3497 bp, Homosapiens
agatttgggcgggctaggagggtttgggtcttcaggtcacatctggacggagagacctccggggcctccgttggtcggtccttccgctccggataccgttccggatgtcaggtagttcaggtcccgccccgacgccggccgtgacgaaggcacgccggggtgacctcaccctccaacatggcggcggcggtagattagggccgcgggtcggagcactcaccgccgctgggggaccctgtcggaagcaactgccgccgccgcctctttcatctcttctggggcaggggccagggccaggttttacacatccataagtagacctttttggagcctcaccagccaattcaatggcgtcctcttctactgtgcctctgggatttcactatgaaacaaagtatgttgttctcagctacttgggactcctctctcaagagaagctgcaagagcaacatctttcctcaccccaaggggttcaactagatatagcttcacaatctctggatcaagaaattttattaaaagttaaaactgaaattgaagaagagctaaaatctctggacaaagaaatttctgaagccttcaccagcacaggctttgaccgtcacacttctccagtgttcagccctgccaatccagaaagctcaatggaagactgcttggcccatcttggagaaaaagtgtcccaggaactgaaagagcctctccataaagcattgcaaatgctcctgagccagccagtgacatatcaggcatttcgggaatgtacactggagaccacagttcatgccagcggctggaataagattttggtgcctctggttttgctacgacaaatgcttttggaattgacaagacgtggtcaagaacctttgagcgcactgctgcagtttggcgtgacatacctggaggactattcggcagagtacatcattcagcaaggtggctggggcactgtgtttagtcttgagtcagaggaggaggaataccctggaatcactgcagaagatagcaatgacatttacatcctgcccagcgacaactctggacaagtcagtcccccagagtctccaactgtgaccacttcctggcagtctgagagcttacctgtgtcactgtcagctagccagagttggcacacagaaagcctgccagtgtcactaggccctgagtcctggcagcagattgcaatggatcctgaagaagtgaaaagcttagacagcaacggagctggagagaagagtgagaacaactcctctaattctgacattgtgcacgtggagaaagaagaggtgcccgagggcatggaagaggctgctgtggcttctgtggtcttgccagcgcgggagctgcaagaggcacttcctgaagccccagctcccttgcttccacatatcactgccacctccctgctggggacaagggaacctgacacagaagtgatcacagttgagaaatccagccctgctacatctctgtttgtagaacttgatgaagaagaggtgaaagcagcaacaactgaacctactgaagtggaggaggtggtccccgcactggaacccacagaaacgctgctgagtgagaaggagataaacgcaagggaagagagccttgtggaagagctgtcccctgccagcgagaagaagcccgtgccgccgtctgagggcaagtctagactgtcccccgccggtgagatgaagcccatgccgctgtctgagggcaagtctatactgctgtttggaggggctgctgctgttgccatcctggcagtggccatcggggtagccctggctctgagaaagaaataggaggcttttcagaagagaaagacagaaggatgtaaggttggagttgtattggctggaatttgaacctccagcagctgtctggacatttgtggaacactctgggataattggggacttctgctcaacatggcagtggcatgttaggcatgttagggcttgaggtggggcattcacattcatctgactgtaaatcccaagggcctccgctcatgctaaattgagaatcttaggggtaaagcaccccctccaggaccgggtttctcagccttggcactagtgctgttctgaccattctctgtgttggggctgtcctgtgtgtggtgggctccacccactagatgccagtggcaccccctcccagagatgacaaacgaaaatgtctctagacattgccaaatgtcccgtgtgaacatcccctattgagacccactgctttagcgagagagggtttacttaggaagaattgggatagaaattcccagctgagagaacttagctgtgggctcctcagctactgacttcttagctcttaatccccttagaatttcatctttctcgatgagcaggctctgcacccactctttttttgccccccgccctcatcctggagtgtgagggtgctcgcccgtactctcagctgcctctcagggactgcactgttcctcttcacccccaggttcctgctaagatcccacgggcgagggcttgctctggactcagtctgtcaagtccccgaagcttcctgcagctccaccttgtaaaaatgctgcctttgggaatcttcgaaatatgtacacagagaaaatcacatgaaggagacctggggtccccacttgtgagtgcaactgcaagtaactctggctagagagacacatgtgtcttgtgtcaaggcaggaggataacctggatgaccttctgaggtctcttcagcccttttcgctagtggtcacccaccaccatggttacttgccagcaacatctctattgctggatggtccctgtctataaccttgggctagtatattttttccaatatgggaccttagtcttactactgatgagttctatgggtctcttgctagggggtaaggatttttattcttgggcttatagagccagttagatcataattcttatgaaatagagagtgtcctaaatatcactgaaataaaaagtaggaaaaagaagcttgaattttaagactgaggctgctctgcagattctagtttggctttcagagttcaagagtggtggcatcttcacctgaattcttcaatgccagggtaataaaccaaaatagtcctaatcagtatatgctagttgagcatcggcataattttctttcctctggctgatcccagccctaaaggaagggtagacccgtgtctttccagccctaaaggaagggtagacccgtgtctttccagccctaaaggaagggcagacccgtgtctttccatgcccgagggccacgacgtcactatgcagggcacacgtggcttggtttaaaaaggtcatcttagatttatcttagtaaatgtaataaattattttttagatcttgaaatttataataaaaatactttacctaccctgatcaccaaaacctgatgttttaaatgtgctttctttttgaaatttatgttttcaaataaaatctccctaaagcaatatttaaaaattggtcaaaac

SEQ ID NO: 4596 - protein, 485 aa, Homosapiens; identical to SEQ ID NO: 656

SEQ ID NO: 4597 - DNA, 4734 bp, Homosapiens
agatttgggcgggctaggagggtttgggtcttcaggtcacatctggacggagagacctccggggcctccgttggtcggtccttccgctccggataccgttccggatgtcaggtagttcaggtcccgccccgacgccggccgtgacgaaggcacgccggggtgacctcaccctccaacatggcggcggcggtagattagggccgcgggtcggagcactcaccgccgctgggggaccctgtcggaagcaactgccgccgccgcctctttcatctcttctggggcaggggccagggccaggttttacacatccataagtagacctttttggagcctcaccagccaattcaatggcgtcctcttctactgtgcctctgggatttcactatgaaacaaagtatgttgttctcagctacttgggactcctctctcaagagaagctgcaagagcaacatctttcctcaccccaaggggttcaactagatatagcttcacaatctctggatcaagaaattttattaaaagttaaaactgaaattgaagaagagctaaaatctctggacaaagaaatttctgaaggccagtgacatatcaggcatttcgggaatgtacactggagaccacagttcatgccagcggctggaataagattttggtgcctctggttttgctacgacaaatgcttttggaattgacaagacgtggtcaagaacctttgagcgcactgctgcagtttggcgtgacatacctggaggactattcggcagagtacatcattcagcaaggtggctggggcactgtgtttagtcttgagtcagaggaggaggaataccctggaatcactgcagaagatagcaatgacatttacatcctgcccagcgacaactctggacaagtcagtcccccagagtctccaactgtgaccacttcctggcagtctgagagcttacctgtgtcactgtcagctagccagagttggcacacagaaagcctgccagtgtcactaggccctgagtcctggcagcagattgcaatggatcctgaagaagtgaaaagcttagacagcaacggagctggagagaagagtgagaacaactcctctaattctgacattgtgcacgtggagaaagaagaggtgcccgagggcatggaagaggctgctgtggcttctgtggtcttgccagcgcgggagctgcaagaggcacttcctgaagccccagctcccttgcttccacatatcactgccacctccctgctggggacaagggaacctgacacagaagtgatcacagttgagaaatccagccctgctacatctctgtttgtagaacttgatgaagaagaggtgaaagcagcaacaactgaacctactgaagtggaggaggtggtccccgcactggaacccacagaaacgctgctgagtgagaaggagataaacgcaagggaagagagccttgtggaagagctgtcccctgccagcgagaagaagcccgtgccgccgtctgagggcaagtctagactgtcccccgccggtgagatgaagcccatgccgctgtctgagggcaagtctatactgctgtttggaggggctgctgctgttgccatcctggcagtggccatcggggtagccctggctctgagaaagaaataggaggcttttcagaagagaaagacagaaggatgtaaggttggagttgtattggctggaatttgaacctccagcagctgtctggacatttgtggaacactctgggataattggggacttctgctcaacatggcagtggcatgttaggcatgttagggcttgaggtggggcattcacattcatctgactgtaaatcccaagggcctccgctcatgctaaattgagaatcttaggggtaaagcaccccctccaggaccgggtttctcagccttggcactagtgctgttctgaccattctctgtgttggggctgtcctgtgtgtggtgggctccacccactagatgccagtggcaccccctcccagagatgacaaacgaaaatgtctctagacattgccaaatgtcccgtgtgaacatcccctattgagacccactgctttagcgagagagggtttacttaggaagaattgggatagaaattcccagctgagagaacttagctgtgggctcctcagctactgacttcttagctcttaatccccttagaatttcatctttctcgatgagcaggctctgcacccactctttttttgccccccgccctcatcctggagtgtgagggtgctcgcccgtactctcagctgcctctcagggactgcactgttcctcttcacccccaggttcctgctaagatcccacgggcgagggcttgctctggactcagtctgtcaagtccccgaagcttcctgcagctccaccttgtaaaaatgctgcctttgggaatcttcgaaatatgtacacagagaaaatcacatgaaggagacctggggtccccacttgtgagtgcaactgcaagtaactctggctagagagacacatgtgtcttgtgtcaaggcaggaggataacctggatgaccttctgaggtctcttcagcccttttcgctagtggtcacccaccaccatggttacttgccagcaacatctctattgctggatggtccctgtctataaccttgggctagtatattttttccaatatgggaccttagtcttactactgatgagttctatgggtctcttgctagggggtaaggatttttattcttgggcttatagagccagttagatcataattcttatgaaatagagagtgtcctaaatatcactgaaataaaaagtaggaaaaagaagcttgaattttaagactgaggctgctctgcagattctagtttggctttcagagttcaagagtggtggcatcttcacctgaattcttcaatgccagggtaataaaccaaaatagtcctaatcagtatatgctagttgagcatcggcataattttctttcctctggctgatcccagccctaaaggaagggtagacccgtgtctttccagccctaaaggaagggtagacccgtgtctttccagccctaaaggaagggcagacccgtgtctttccatgcccgagggccacgacgtcactatgcagggcacacgtggcttggtttaaaaaggtcatcttagatttatcttagtaaatgtaataaattattttttagatcttgaaatttataataaaaatactttacctaccctgatcaccaaaacctgatgttttaaatgtgctttctttttgaaatttatgttttcaaataaaatctccctaaagcaatatttaaaaattggtcaaaacaaggtctgggagtatgtttgtgtgtctttccagctttatcctgtagcgtgtctttgttctgtgttttagtgtcccatttagggagtgatgttttaagggtttttgtgtacttggattaagtaattagaggtgagtggggggaatgggattattgaggcaatgatttttttcttcatgggctctgatagttgcattgattgttctgtattctaattgctatatttgtgtttgcataggtgaagagcaaactggtgcgttatcttgatttttaaaaagtaataaatcctatgagttccagtattaacacttgccagttctggatcctcacacccattggctgagcgcattcaagcaccaatcgaagccaggttcatctctgagctgctgaaaggaggtgtgaggcttaggaaattggagcctgtgttgcccacgaaaggaaagaataaggaagaaatgtggtatggaagcggctacttgctgctttattttcccacctgttagacattcctccacagtgatttggccagttgtatttcacggtaatggaactagatagtgttttccattggctttctctggtagctcttggtcagctcctgagttaacaggatgtggcagcatccctgttcttccttcacgtcctcaccctctgcctccagcagtggaagggaacagccctcatgaggactgcttcctactgcagctcctgctttttgctcatacatttaaaaaactatttctcaagcttcccctccttttggggggaggagctgatagtaggaggccattccttccacctccaacttataccctctaagtctaaggtgaaggaaagattcagaataaatccaacttgtttatagaaaagttcttgttagtccttagacctcatctcaactgctctgttgaaggtaatgatttattggggggaaaaaacaacgccaatttatcctctctgtattaaagtgataattctgggcccacagaaatcagtcagtacctgcggtgtgccttaaggggactctcatgatcatcattcccttctagagaacattctagatgaagaaatgcaactgttgaccttctggttcacccatctccccctcgaggcattcttgataccccttctcacctgcatttctgtcccagggataccagatgcagccactacctaactaggcttgtcctgggggagtgagccgtgaacctggagacatggctttgacccacagctactgttcatttcctcaggctttgcgctgattccctcaataatatgacagtaaggcaagtagtctccttgcctttctcctgaaaggtatgagatgtggacatttcagtgtttgaattattttaagagatgttttatagaaataaaacgttttgtagctaag

SEQ ID NO: 4598 - protein, 323 aa, Homosapiens; identical to SEQ ID NO: 4582

SEQ ID NO: 4599 - DNA, 4891 bp, Homosapiens
agatttgggcgggctaggagggtttgggtcttcaggtcacatctggacggagagacctccggggcctccgttggtcggtccttccgctccggataccgttccggatgtcaggtagttcaggtcccgccccgacgccggccgtgacgaaggcacgccggggtgacctcaccctccaacatggcggcggcggtagattagggccgcgggtcggagcactcaccgccgctgggggaccctgtcggaagcaactgccgccgccgcctctttcatctcttctggggcaggggccagggccaggttttacacatccataagtagacctttttggagcctcaccagccaattcaatggcgtcctcttctactgtgcctctgggatttcactatgaaacaaagtatgttgttctcagctacttgggactcctctctcaagagaagctgcaagagcaacatctttcctcaccccaaggggttcaactagatatagcttcacaatctctggatcaagaaattttattaaaagttaaaactgaaattgaagaagagctaaaatctctggacaaagaaatttctgaagccttcaccagcacaggctttgaccgtcacacttctccagtgttcagccctgccaatccagaaagctcaatggaagactgcttggcccatcttggagaaaaagtgtcccaggaactgaaagagcctctccataaagcattgcaaatgctcctgagccagccagtgacatatcaggcatttcgggaatgtacactggagaccacagttcatgccagcggctggaataagattttggtgcctctggttttgctacgacaaatgcttttggaattgacaagacgtggtcaagaacctttgagcgcactgctgcagtttggcgtgacatacctggaggactattcggcagagtacatcattcagcaaggtggctggggcactgtgtttagtcttgagtcagaggaggaggaataccctggaatcactgcagaagatagcaatgacatttacatcctgcccagcgacaactctggacaagtcagtcccccagagtctccaactgtgaccacttcctggcagtctgagagcttacctgtgtcactgtcagctagccagagttggcacacagaaagcctgccagtgtcactaggccctgagtcctggcagcagattgcaatggatcctgaagaagtgaaaagcttagacagcaacggagctggagagaagagtgagaacaactcctctaattctgacattgtgcacgtggagaaagaagaggtgcccgagggcatggaagaggctgctgtggcttctgtggtcttgccagcgcgggagctgcaagaggcacttcctgaagccccagctcccttgcttccacatatcactgccacctccctgctggggacaagggaacctgacacagaagtgatcacagttgagaaatccagccctgctacatctctgtttgtagaacttgatgaagaagaggtgaaagcagcaacaactgaacctactgaagtggaggaggtggtccccgcactggaacccacagaaacgctgctgagtgagaaggagataaacgcaagggaagagagccttgtggaagagctgtcccctgccagcgagaagaagcccgtgccgccgtctgagggcaagtctagactgtcccccgccggtgagatgaagcccatgccgctgtctgagggcaagtctatactgctgtttggaggggctgctgctgttgccatcctggcagtggccatcggggtagccctggctctgagaaagaaataggaggcttttcagaagagaaagacagaaggatgtaaggttggagttgtattggctggaatttgaacctccagcagctgtctggacatttgtggaacactctgggataattggggacttctgctcaacatggcagtggcatgttaggcatgttagggcttgaggtggggcattcacattcatctgactgtaaatcccaagggcctccgctcatgctaaattgagaatcttaggggtaaagcaccccctccaggaccgggtttctcagccttggcactagtgctgttctgaccattctctgtgttggggctgtcctgtgtgtggtgggctccacccactagatgccagtggcaccccctcccagagatgacaaacgaaaatgtctctagacattgccaaatgtcccgtgtgaacatcccctattgagacccactgctttagcgagagagggtttacttaggaagaattgggatagaaattcccagctgagagaacttagctgtgggctcctcagctactgacttcttagctcttaatccccttagaatttcatctttctcgatgagcaggctctgcacccactctttttttgccccccgccctcatcctggagtgtgagggtgctcgcccgtactctcagctgcctctcagggactgcactgttcctcttcacccccaggttcctgctaagatcccacgggcgagggcttgctctggactcagtctgtcaagtccccgaagcttcctgcagctccaccttgtaaaaatgctgcctttgggaatcttcgaaatatgtacacagagaaaatcacatgaaggagacctggggtccccacttgtgagtgcaactgcaagtaactctggctagagagacacatgtgtcttgtgtcaaggcaggaggataacctggatgaccttctgaggtctcttcagcccttttcgctagtggtcacccaccaccatggttacttgccagcaacatctctattgctggatggtccctgtctataaccttgggctagtatattttttccaatatgggaccttagtcttactactgatgagttctatgggtctcttgctagggggtaaggatttttattcttgggcttatagagccagttagatcataattcttatgaaatagagagtgtcctaaatatcactgaaataaaaagtaggaaaaagaagcttgaattttaagactgaggctgctctgcagattctagtttggctttcagagttcaagagtggtggcatcttcacctgaattcttcaatgccagggtaataaaccaaaatagtcctaatcagtatatgctagttgagcatcggcataattttctttcctctggctgatcccagccctaaaggaagggtagacccgtgtctttccagccctaaaggaagggtagacccgtgtctttccagccctaaaggaagggcagacccgtgtctttccatgcccgagggccacgacgtcactatgcagggcacacgtggcttggtttaaaaaggtcatcttagatttatcttagtaaatgtaataaattattttttagatcttgaaatttataataaaaatactttacctaccctgatcaccaaaacctgatgttttaaatgtgctttctttttgaaatttatgttttcaaataaaatctccctaaagcaatatttaaaaattggtcaaaacaaggtctgggagtatgtttgtgtgtctttccagctttatcctgtagcgtgtctttgttctgtgttttagtgtcccatttagggagtgatgttttaagggtttttgtgtacttggattaagtaattagaggtgagtggggggaatgggattattgaggcaatgatttttttcttcatgggctctgatagttgcattgattgttctgtattctaattgctatatttgtgtttgcataggtgaagagcaaactggtgcgttatcttgatttttaaaaagtaataaatcctatgagttccagtattaacacttgccagttctggatcctcacacccattggctgagcgcattcaagcaccaatcgaagccaggttcatctctgagctgctgaaaggaggtgtgaggcttaggaaattggagcctgtgttgcccacgaaaggaaagaataaggaagaaatgtggtatggaagcggctacttgctgctttattttcccacctgttagacattcctccacagtgatttggccagttgtatttcacggtaatggaactagatagtgttttccattggctttctctggtagctcttggtcagctcctgagttaacaggatgtggcagcatccctgttcttccttcacgtcctcaccctctgcctccagcagtggaagggaacagccctcatgaggactgcttcctactgcagctcctgctttttgctcatacatttaaaaaactatttctcaagcttcccctccttttggggggaggagctgatagtaggaggccattccttccacctccaacttataccctctaagtctaaggtgaaggaaagattcagaataaatccaacttgtttatagaaaagttcttgttagtccttagacctcatctcaactgctctgttgaaggtaatgatttattggggggaaaaaacaacgccaatttatcctctctgtattaaagtgataattctgggcccacagaaatcagtcagtacctgcggtgtgccttaaggggactctcatgatcatcattcccttctagagaacattctagatgaagaaatgcaactgttgaccttctggttcacccatctccccctcgaggcattcttgataccccttctcacctgcatttctgtcccagggataccagatgcagccactacctaactaggcttgtcctgggggagtgagccgtgaacctggagacatggctttgacccacagctactgttcatttcctcaggctttgcgctgattccctcaataatatgacagtaaggcaagtagtctccttgcctttctcctgaaaggtatgagatgtggacatttcagtgtttgaattattttaagagatgttttatagaaataaaacgttttgtagctaag

SEQ ID NO: 4600 - protein, 485 aa, Homosapiens; identical to SEQ ID NO: 656

SEQ ID NO: 4601 - DNA, 4664 bp, Homosapiens
agatttgggcgggctaggagggtttgggtcttcaggtcacatctggacggagagacctccggggcctccgttggtcggtccttccgctccggataccgttccggatgtcaggtagttcaggtcccgccccgacgccggccgtgacgaaggcacgccggggtgacctcaccctccaacatggcggcggcggtagattagggccgcgggtcggagcactcaccgccgctgggggaccctgtcggaagcaactgccgccgccgcctctttcatctcttctggggcaggggccagggccaggttttacacatccataagtagacctttttggagcctcaccagccaattcaatggcgtcctcttctactgtgcctctgggatttcactatgaaacaaagtatgttgttctcagctacttgggactcctctctcaagagaagctgcaagagcaacatctttcctcaccccaaggggttcaactagatatagcttcacaatctctggatcaagaaattttattaaaagttaaaactgaaattgaagaagagctaaaatctctggacaaagaaatttctgaagattttggtgcctctggttttgctacgacaaatgcttttggaattgacaagacgtggtcaagaacctttgagcgcactgctgcagtttggcgtgacatacctggaggactattcggcagagtacatcattcagcaaggtggctggggcactgtgtttagtcttgagtcagaggaggaggaataccctggaatcactgcagaagatagcaatgacatttacatcctgcccagcgacaactctggacaagtcagtcccccagagtctccaactgtgaccacttcctggcagtctgagagcttacctgtgtcactgtcagctagccagagttggcacacagaaagcctgccagtgtcactaggccctgagtcctggcagcagattgcaatggatcctgaagaagtgaaaagcttagacagcaacggagctggagagaagagtgagaacaactcctctaattctgacattgtgcacgtggagaaagaagaggtgcccgagggcatggaagaggctgctgtggcttctgtggtcttgccagcgcgggagctgcaagaggcacttcctgaagccccagctcccttgcttccacatatcactgccacctccctgctggggacaagggaacctgacacagaagtgatcacagttgagaaatccagccctgctacatctctgtttgtagaacttgatgaagaagaggtgaaagcagcaacaactgaacctactgaagtggaggaggtggtccccgcactggaacccacagaaacgctgctgagtgagaaggagataaacgcaagggaagagagccttgtggaagagctgtcccctgccagcgagaagaagcccgtgccgccgtctgagggcaagtctagactgtcccccgccggtgagatgaagcccatgccgctgtctgagggcaagtctatactgctgtttggaggggctgctgctgttgccatcctggcagtggccatcggggtagccctggctctgagaaagaaataggaggcttttcagaagagaaagacagaaggatgtaaggttggagttgtattggctggaatttgaacctccagcagctgtctggacatttgtggaacactctgggataattggggacttctgctcaacatggcagtggcatgttaggcatgttagggcttgaggtggggcattcacattcatctgactgtaaatcccaagggcctccgctcatgctaaattgagaatcttaggggtaaagcaccccctccaggaccgggtttctcagccttggcactagtgctgttctgaccattctctgtgttggggctgtcctgtgtgtggtgggctccacccactagatgccagtggcaccccctcccagagatgacaaacgaaaatgtctctagacattgccaaatgtcccgtgtgaacatcccctattgagacccactgctttagcgagagagggtttacttaggaagaattgggatagaaattcccagctgagagaacttagctgtgggctcctcagctactgacttcttagctcttaatccccttagaatttcatctttctcgatgagcaggctctgcacccactctttttttgccccccgccctcatcctggagtgtgagggtgctcgcccgtactctcagctgcctctcagggactgcactgttcctcttcacccccaggttcctgctaagatcccacgggcgagggcttgctctggactcagtctgtcaagtccccgaagcttcctgcagctccaccttgtaaaaatgctgcctttgggaatcttcgaaatatgtacacagagaaaatcacatgaaggagacctggggtccccacttgtgagtgcaactgcaagtaactctggctagagagacacatgtgtcttgtgtcaaggcaggaggataacctggatgaccttctgaggtctcttcagcccttttcgctagtggtcacccaccaccatggttacttgccagcaacatctctattgctggatggtccctgtctataaccttgggctagtatattttttccaatatgggaccttagtcttactactgatgagttctatgggtctcttgctagggggtaaggatttttattcttgggcttatagagccagttagatcataattcttatgaaatagagagtgtcctaaatatcactgaaataaaaagtaggaaaaagaagcttgaattttaagactgaggctgctctgcagattctagtttggctttcagagttcaagagtggtggcatcttcacctgaattcttcaatgccagggtaataaaccaaaatagtcctaatcagtatatgctagttgagcatcggcataattttctttcctctggctgatcccagccctaaaggaagggtagacccgtgtctttccagccctaaaggaagggtagacccgtgtctttccagccctaaaggaagggcagacccgtgtctttccatgcccgagggccacgacgtcactatgcagggcacacgtggcttggtttaaaaaggtcatcttagatttatcttagtaaatgtaataaattattttttagatcttgaaatttataataaaaatactttacctaccctgatcaccaaaacctgatgttttaaatgtgctttctttttgaaatttatgttttcaaataaaatctccctaaagcaatatttaaaaattggtcaaaacaaggtctgggagtatgtttgtgtgtctttccagctttatcctgtagcgtgtctttgttctgtgttttagtgtcccatttagggagtgatgttttaagggtttttgtgtacttggattaagtaattagaggtgagtggggggaatgggattattgaggcaatgatttttttcttcatgggctctgatagttgcattgattgttctgtattctaattgctatatttgtgtttgcataggtgaagagcaaactggtgcgttatcttgatttttaaaaagtaataaatcctatgagttccagtattaacacttgccagttctggatcctcacacccattggctgagcgcattcaagcaccaatcgaagccaggttcatctctgagctgctgaaaggaggtgtgaggcttaggaaattggagcctgtgttgcccacgaaaggaaagaataaggaagaaatgtggtatggaagcggctacttgctgctttattttcccacctgttagacattcctccacagtgatttggccagttgtatttcacggtaatggaactagatagtgttttccattggctttctctggtagctcttggtcagctcctgagttaacaggatgtggcagcatccctgttcttccttcacgtcctcaccctctgcctccagcagtggaagggaacagccctcatgaggactgcttcctactgcagctcctgctttttgctcatacatttaaaaaactatttctcaagcttcccctccttttggggggaggagctgatagtaggaggccattccttccacctccaacttataccctctaagtctaaggtgaaggaaagattcagaataaatccaacttgtttatagaaaagttcttgttagtccttagacctcatctcaactgctctgttgaaggtaatgatttattggggggaaaaaacaacgccaatttatcctctctgtattaaagtgataattctgggcccacagaaatcagtcagtacctgcggtgtgccttaaggggactctcatgatcatcattcccttctagagaacattctagatgaagaaatgcaactgttgaccttctggttcacccatctccccctcgaggcattcttgataccccttctcacctgcatttctgtcccagggataccagatgcagccactacctaactaggcttgtcctgggggagtgagccgtgaacctggagacatggctttgacccacagctactgttcatttcctcaggctttgcgctgattccctcaataatatgacagtaaggcaagtagtctccttgcctttctcctgaaaggtatgagatgtggacatttcagtgtttgaattattttaagagatgttttatagaaataaaacgttttgtagctaag

SEQ ID NO: 4602 - protein, 323 aa, Homosapiens; identical to SEQ ID NO: 4582

SEQ ID NO: 4603 - DNA, 4677 bp, Homosapiens
agatttgggcgggctaggagggtttgggtcttcaggtcacatctggacggagagacctccggggcctccgttggtcggtccttccgctccggataccgttccggatgtcaggtagttcaggtcccgccccgacgccggccgtgacgaaggcacgccggggtgacctcaccctccaacatggcggcggcggtagattagggccgcgggtcggagcactcaccgccgctgggggaccctgtcggaagcaactgccgccgccgcctctttcatctcttctggggcaggggccagggccaggttttacacatccataagtagacctttttggagcctcaccagccaattcaatggcgtcctcttctactgtgcctctgggatttcactatgaaacaaagtatgttgttctcagctacttgggactcctctctcaagagaagctgcaagagcaacatctttcctcaccccaaggggttcaactagatatagcttcacaatctctggatcaagaaattttattaaaagttaaaactgaaattgaagaagagctaaaatctctggacaaagaaatttctgaagccttcaccagcacaggctttgaccgtcacacttctccagtgttcagccctgccaatccagaaagctcaatggaagactgcttggcccatcttggagaaaaagtgtcccaggaactgaaagagcctctccataaagcattgcaaatgctcctgagccaggcactgtgtttagtcttgagtcagaggaggaggaataccctggaatcactgcagaagatagcaatgacatttacatcctgcccagcgacaactctggacaagtcagtcccccagagtctccaactgtgaccacttcctggcagtctgagagcttacctgtgtcactgtcagctagccagagttggcacacagaaagcctgccagtgtcactaggccctgagtcctggcagcagattgcaatggatcctgaagaagtgaaaagcttagacagcaacggagctggagagaagagtgagaacaactcctctaattctgacattgtgcacgtggagaaagaagaggtgcccgagggcatggaagaggctgctgtggcttctgtggtcttgccagcgcgggagctgcaagaggcacttcctgaagccccagctcccttgcttccacatatcactgccacctccctgctggggacaagggaacctgacacagaagtgatcacagttgagaaatccagccctgctacatctctgtttgtagaacttgatgaagaagaggtgaaagcagcaacaactgaacctactgaagtggaggaggtggtccccgcactggaacccacagaaacgctgctgagtgagaaggagataaacgcaagggaagagagccttgtggaagagctgtcccctgccagcgagaagaagcccgtgccgccgtctgagggcaagtctagactgtcccccgccggtgagatgaagcccatgccgctgtctgagggcaagtctatactgctgtttggaggggctgctgctgttgccatcctggcagtggccatcggggtagccctggctctgagaaagaaataggaggcttttcagaagagaaagacagaaggatgtaaggttggagttgtattggctggaatttgaacctccagcagctgtctggacatttgtggaacactctgggataattggggacttctgctcaacatggcagtggcatgttaggcatgttagggcttgaggtggggcattcacattcatctgactgtaaatcccaagggcctccgctcatgctaaattgagaatcttaggggtaaagcaccccctccaggaccgggtttctcagccttggcactagtgctgttctgaccattctctgtgttggggctgtcctgtgtgtggtgggctccacccactagatgccagtggcaccccctcccagagatgacaaacgaaaatgtctctagacattgccaaatgtcccgtgtgaacatcccctattgagacccactgctttagcgagagagggtttacttaggaagaattgggatagaaattcccagctgagagaacttagctgtgggctcctcagctactgacttcttagctcttaatccccttagaatttcatctttctcgatgagcaggctctgcacccactctttttttgccccccgccctcatcctggagtgtgagggtgctcgcccgtactctcagctgcctctcagggactgcactgttcctcttcacccccaggttcctgctaagatcccacgggcgagggcttgctctggactcagtctgtcaagtccccgaagcttcctgcagctccaccttgtaaaaatgctgcctttgggaatcttcgaaatatgtacacagagaaaatcacatgaaggagacctggggtccccacttgtgagtgcaactgcaagtaactctggctagagagacacatgtgtcttgtgtcaaggcaggaggataacctggatgaccttctgaggtctcttcagcccttttcgctagtggtcacccaccaccatggttacttgccagcaacatctctattgctggatggtccctgtctataaccttgggctagtatattttttccaatatgggaccttagtcttactactgatgagttctatgggtctcttgctagggggtaaggatttttattcttgggcttatagagccagttagatcataattcttatgaaatagagagtgtcctaaatatcactgaaataaaaagtaggaaaaagaagcttgaattttaagactgaggctgctctgcagattctagtttggctttcagagttcaagagtggtggcatcttcacctgaattcttcaatgccagggtaataaaccaaaatagtcctaatcagtatatgctagttgagcatcggcataattttctttcctctggctgatcccagccctaaaggaagggtagacccgtgtctttccagccctaaaggaagggtagacccgtgtctttccagccctaaaggaagggcagacccgtgtctttccatgcccgagggccacgacgtcactatgcagggcacacgtggcttggtttaaaaaggtcatcttagatttatcttagtaaatgtaataaattattttttagatcttgaaatttataataaaaatactttacctaccctgatcaccaaaacctgatgttttaaatgtgctttctttttgaaatttatgttttcaaataaaatctccctaaagcaatatttaaaaattggtcaaaacaaggtctgggagtatgtttgtgtgtctttccagctttatcctgtagcgtgtctttgttctgtgttttagtgtcccatttagggagtgatgttttaagggtttttgtgtacttggattaagtaattagaggtgagtggggggaatgggattattgaggcaatgatttttttcttcatgggctctgatagttgcattgattgttctgtattctaattgctatatttgtgtttgcataggtgaagagcaaactggtgcgttatcttgatttttaaaaagtaataaatcctatgagttccagtattaacacttgccagttctggatcctcacacccattggctgagcgcattcaagcaccaatcgaagccaggttcatctctgagctgctgaaaggaggtgtgaggcttaggaaattggagcctgtgttgcccacgaaaggaaagaataaggaagaaatgtggtatggaagcggctacttgctgctttattttcccacctgttagacattcctccacagtgatttggccagttgtatttcacggtaatggaactagatagtgttttccattggctttctctggtagctcttggtcagctcctgagttaacaggatgtggcagcatccctgttcttccttcacgtcctcaccctctgcctccagcagtggaagggaacagccctcatgaggactgcttcctactgcagctcctgctttttgctcatacatttaaaaaactatttctcaagcttcccctccttttggggggaggagctgatagtaggaggccattccttccacctccaacttataccctctaagtctaaggtgaaggaaagattcagaataaatccaacttgtttatagaaaagttcttgttagtccttagacctcatctcaactgctctgttgaaggtaatgatttattggggggaaaaaacaacgccaatttatcctctctgtattaaagtgataattctgggcccacagaaatcagtcagtacctgcggtgtgccttaaggggactctcatgatcatcattcccttctagagaacattctagatgaagaaatgcaactgttgaccttctggttcacccatctccccctcgaggcattcttgataccccttctcacctgcatttctgtcccagggataccagatgcagccactacctaactaggcttgtcctgggggagtgagccgtgaacctggagacatggctttgacccacagctactgttcatttcctcaggctttgcgctgattccctcaataatatgacagtaaggcaagtagtctccttgcctttctcctgaaaggtatgagatgtggacatttcagtgtttgaattattttaagagatgttttatagaaataaaacgttttgtagctaag

SEQ ID NO: 4604 - protein, 171 aa, Homosapiens; identical to SEQ ID NO: 4588

SEQ ID NO: 4605 - DNA, 5025 bp, Homosapiens
agatttgggcgggctaggagggtttgggtcttcaggtcacatctggacggagagacctccggggcctccgttggtcggtccttccgctccggataccgttccggatgtcaggtagttcaggtcccgccccgacgccggccgtgacgaaggcacgccggggtgacctcaccctccaacatggcggcggcggtagattagggccgcgggtcggagcactcaccgccgctgggggaccctgtcggaagcaactgccgccgccgcctctttcatctcttctggggcaggggccagggccaggttttacacatccataagtagacctttttggagcctcaccagccaattcaatggcgtcctcttctactgtgcctctgggatttcactatgaaacaaagtatgttgttctcagctacttgggactcctctctcaagagaagctgcaagagcaacatctttcctcaccccaaggggttcaactagatatagcttcacaatctctggatcaagaaattttattaaaagttaaaactgaaattgaagaagagctaaaatctctggacaaagaaatttctgaaggccagtgacatatcaggcatttcgggaatgtacactggagaccacagttcatgccagcggctggaataagattttggtgcctctggttttgctacgacaaatgcttttggaattgacaagacgtggtcaagaacctttgagcgcactgctgcagtttggcgtgacatacctggaggactattcggcagagtacatcattcagcaaggtggctggggcactgtgtttagtcttgagtcagaggaggaggaataccctggaatcactgcagaagatagcaatgacatttacatcctgcccagcgacaactctggacaagtcagtcccccagagtctccaactgtgaccacttcctggcagtctgagagcttacctgtgtcactgtcagctagccagagttggcacacagaaagcctgccagtgtcactaggccctgagtcctggcagcagattgcaatggatcctgaagaagtgaaaagcttagacagcaacggagctggagagaagagtgagaacaactcctctaattctgacattgtgcacgtggagaaagaagaggtgcccgagggcatggaagaggctgctgtggcttctgtggtcttgccagcgcgggagctgcaagaggcacttcctgaagccccagctcccttgcttccacatatcactgccacctccctgctggggacaagggaacctgacacagaagtgatcacagttgagaaatccagccctgctacatctctgtttgtagaacttgatgaagaagaggtgaaagcagcaacaactgaacctactgaagtggaggaggtggtccccgcactggaacccacagaaacgctgctgagtgagaaggagataaacgcaagggaagagagccttgtggaagagctgtcccctgccagcgagaagaagcccgtgccgccgtctgagggcaagtctagactgtcccccgccggtgagatgaagcccatgccgctgtctgagggcaagtctatactgctgtttggaggggctgctgctgttgccatcctggcagtggccatcggggtagccctggctctgagaaagaaataggaggcttttcagaagagaaagacagaaggatgtaaggttggagttgtattggctggaatttgaacctccagcagctgtctggacatttgtggaacactctgggataattggggacttctgctcaacatggcagtggcatgttaggcatgttagggcttgaggtggggcattcacattcatctgactgtaaatcccaagggcctccgctcatgctaaattgagaatcttaggggtaaagcaccccctccaggaccgggtttctcagccttggcactagtgctgttctgaccattctctgtgttggggctgtcctgtgtgtggtgggctccacccactagatgccagtggcaccccctcccagagatgacaaacgaaaatgtctctagacattgccaaatgtcccgtgtgaacatcccctattgagacccactgctttagcgagagagggtttacttaggaagaattgggatagaaattcccagctgagagaacttagctgtgggctcctcagctactgacttcttagctcttaatccccttagaatttcatctttctcgatgagcaggctctgcacccactctttttttgccccccgccctcatcctggagtgtgagggtgctcgcccgtactctcagctgcctctcagggactgcactgttcctcttcacccccaggttcctgctaagatcccacgggcgagggcttgctctggactcagtctgtcaagtccccgaagcttcctgcagctccaccttgtaaaaatgctgcctttgggaatcttcgaaatatgtacacagagaaaatcacatgaaggagacctggggtccccacttgtgagtgcaactgcaagtaactctggctagagagacacatgtgtcttgtgtcaaggcaggaggataacctggatgaccttctgaggtctcttcagcccttttcgctagtggtcacccaccaccatggttacttgccagcaacatctctattgctggatggtccctgtctataaccttgggctagtatattttttccaatatgggaccttagtcttactactgatgagttctatgggtctcttgctagggggtaaggatttttattcttgggcttatagagccagttagatcataattcttatgaaatagagagtgtcctaaatatcactgaaataaaaagtaggaaaaagaagcttgaattttaagactgaggctgctctgcagattctagtttggctttcagagttcaagagtggtggcatcttcacctgaattcttcaatgccagggtaataaaccaaaatagtcctaatcagtatatgctagttgagcatcggcataattttctttcctctggctgatcccagccctaaaggaagggtagacccgtgtctttccagccctaaaggaagggtagacccgtgtctttccagccctaaaggaagggcagacccgtgtctttccatgcccgagggccacgacgtcactatgcagggcacacgtggcttggtttaaaaaggtcatcttagatttatcttagtaaatgtaataaattattttttagatcttgaaatttataataaaaatactttacctaccctgatcaccaaaacctgatgttttaaatgtgctttctttttgaaatttatgttttcaaataaaatctccctaaagcaatatttaaaaattggtcaaaacaaggtctgggagtatgtttgtgtgtctttccagctttatcctgtagcgtgtctttgttctgtgttttagtgtcccatttagggagtgatgttttaagggtttttgtgtacttggattaagtaattagaggtgagtggggggaatgggattattgaggcaatgatttttttcttcatgggctctgatagttgcattgattgttctgtattctaattgctatatttgtgtttgcataggtgaagagcaaactggtgcgttatcttgatttttaaaaagtaataaatcctatgagttccagtattaacacttgccagttctggatcctcacacccattggctgagcgcattcaagcaccaatcgaagccaggttcatctctgagctgctgaaaggaggtgtgaggcttaggaaattggagcctgtgttgcccacgaaaggaaagaataaggaagaaatgtggtatggaagcggctacttgctgctttattttcccacctgttagacattcctccacagtgatttggccagttgtatttcacggtaatggaactagatagtgttttccattggctttctctggtagctcttggtcagctcctgagttaacaggatgtggcagcatccctgttcttccttcacgtcctcaccctctgcctccagcagtggaagggaacagccctcatgaggactgcttcctactgcagctcctgctttttgctcatacatttaaaaaactatttctcaagcttcccctccttttggggggaggagctgatagtaggaggccattccttccacctccaacttataccctctaagtctaaggtgaaggaaagattcagaataaatccaacttgtttatagaaaagttcttgttagtccttagacctcatctcaactgctctgttgaaggtaatgatttattggggggaaaaaacaacgccaatttatcctctctgtattaaagtgataattctgggcccacagaaatcagtcagtacctgcggtgtgccttaaggggactctcatgatcatcattcccttctagagaacattctagatgaagaaatgcaactgttgaccttctggttcacccatctccccctcgaggcattcttgataccccttctcacctgcatttctgtcccagggataccagatgcagccactacctaactaggcttgtcctgggggagtgagccgtgaacctggagacatggctttgacccacagctactgttcatttcctcaggctttgcgctgattccctcaataatatgacagtaaggcaagtagtctccttgcctttctcctgaaaggtatgagatgtggacatttcagtgtttgaattattttaagagatgttttatagaaataaaacgttttgtagctaagaattttccctttctcttaatttcttacatctttccacacaaacttatctttccaagaatttgaggtggtgatcatacccatcaagacggccttgtaggctatctgattgctaacagacacgacctagagcttctgcccaaattcccacacaagcattatctcgtttaacatctcagcgacatactggataccagaataatgtttcctcttctctggtgcaccaaaacctgcccttagtgataatctctcaattatgacattcatttgagtttagggtgtataatttttcct

SEQ ID NO: 4606 - protein, 323 aa, Homosapiens; identical to SEQ ID NO: 4582

SEQ ID NO: 4607 - DNA, 5182 bp, Homosapiens
agatttgggcgggctaggagggtttgggtcttcaggtcacatctggacggagagacctccggggcctccgttggtcggtccttccgctccggataccgttccggatgtcaggtagttcaggtcccgccccgacgccggccgtgacgaaggcacgccggggtgacctcaccctccaacatggcggcggcggtagattagggccgcgggtcggagcactcaccgccgctgggggaccctgtcggaagcaactgccgccgccgcctctttcatctcttctggggcaggggccagggccaggttttacacatccataagtagacctttttggagcctcaccagccaattcaatggcgtcctcttctactgtgcctctgggatttcactatgaaacaaagtatgttgttctcagctacttgggactcctctctcaagagaagctgcaagagcaacatctttcctcaccccaaggggttcaactagatatagcttcacaatctctggatcaagaaattttattaaaagttaaaactgaaattgaagaagagctaaaatctctggacaaagaaatttctgaagccttcaccagcacaggctttgaccgtcacacttctccagtgttcagccctgccaatccagaaagctcaatggaagactgcttggcccatcttggagaaaaagtgtcccaggaactgaaagagcctctccataaagcattgcaaatgctcctgagccagccagtgacatatcaggcatttcgggaatgtacactggagaccacagttcatgccagcggctggaataagattttggtgcctctggttttgctacgacaaatgcttttggaattgacaagacgtggtcaagaacctttgagcgcactgctgcagtttggcgtgacatacctggaggactattcggcagagtacatcattcagcaaggtggctggggcactgtgtttagtcttgagtcagaggaggaggaataccctggaatcactgcagaagatagcaatgacatttacatcctgcccagcgacaactctggacaagtcagtcccccagagtctccaactgtgaccacttcctggcagtctgagagcttacctgtgtcactgtcagctagccagagttggcacacagaaagcctgccagtgtcactaggccctgagtcctggcagcagattgcaatggatcctgaagaagtgaaaagcttagacagcaacggagctggagagaagagtgagaacaactcctctaattctgacattgtgcacgtggagaaagaagaggtgcccgagggcatggaagaggctgctgtggcttctgtggtcttgccagcgcgggagctgcaagaggcacttcctgaagccccagctcccttgcttccacatatcactgccacctccctgctggggacaagggaacctgacacagaagtgatcacagttgagaaatccagccctgctacatctctgtttgtagaacttgatgaagaagaggtgaaagcagcaacaactgaacctactgaagtggaggaggtggtccccgcactggaacccacagaaacgctgctgagtgagaaggagataaacgcaagggaagagagccttgtggaagagctgtcccctgccagcgagaagaagcccgtgccgccgtctgagggcaagtctagactgtcccccgccggtgagatgaagcccatgccgctgtctgagggcaagtctatactgctgtttggaggggctgctgctgttgccatcctggcagtggccatcggggtagccctggctctgagaaagaaataggaggcttttcagaagagaaagacagaaggatgtaaggttggagttgtattggctggaatttgaacctccagcagctgtctggacatttgtggaacactctgggataattggggacttctgctcaacatggcagtggcatgttaggcatgttagggcttgaggtggggcattcacattcatctgactgtaaatcccaagggcctccgctcatgctaaattgagaatcttaggggtaaagcaccccctccaggaccgggtttctcagccttggcactagtgctgttctgaccattctctgtgttggggctgtcctgtgtgtggtgggctccacccactagatgccagtggcaccccctcccagagatgacaaacgaaaatgtctctagacattgccaaatgtcccgtgtgaacatcccctattgagacccactgctttagcgagagagggtttacttaggaagaattgggatagaaattcccagctgagagaacttagctgtgggctcctcagctactgacttcttagctcttaatccccttagaatttcatctttctcgatgagcaggctctgcacccactctttttttgccccccgccctcatcctggagtgtgagggtgctcgcccgtactctcagctgcctctcagggactgcactgttcctcttcacccccaggttcctgctaagatcccacgggcgagggcttgctctggactcagtctgtcaagtccccgaagcttcctgcagctccaccttgtaaaaatgctgcctttgggaatcttcgaaatatgtacacagagaaaatcacatgaaggagacctggggtccccacttgtgagtgcaactgcaagtaactctggctagagagacacatgtgtcttgtgtcaaggcaggaggataacctggatgaccttctgaggtctcttcagcccttttcgctagtggtcacccaccaccatggttacttgccagcaacatctctattgctggatggtccctgtctataaccttgggctagtatattttttccaatatgggaccttagtcttactactgatgagttctatgggtctcttgctagggggtaaggatttttattcttgggcttatagagccagttagatcataattcttatgaaatagagagtgtcctaaatatcactgaaataaaaagtaggaaaaagaagcttgaattttaagactgaggctgctctgcagattctagtttggctttcagagttcaagagtggtggcatcttcacctgaattcttcaatgccagggtaataaaccaaaatagtcctaatcagtatatgctagttgagcatcggcataattttctttcctctggctgatcccagccctaaaggaagggtagacccgtgtctttccagccctaaaggaagggtagacccgtgtctttccagccctaaaggaagggcagacccgtgtctttccatgcccgagggccacgacgtcactatgcagggcacacgtggcttggtttaaaaaggtcatcttagatttatcttagtaaatgtaataaattattttttagatcttgaaatttataataaaaatactttacctaccctgatcaccaaaacctgatgttttaaatgtgctttctttttgaaatttatgttttcaaataaaatctccctaaagcaatatttaaaaattggtcaaaacaaggtctgggagtatgtttgtgtgtctttccagctttatcctgtagcgtgtctttgttctgtgttttagtgtcccatttagggagtgatgttttaagggtttttgtgtacttggattaagtaattagaggtgagtggggggaatgggattattgaggcaatgatttttttcttcatgggctctgatagttgcattgattgttctgtattctaattgctatatttgtgtttgcataggtgaagagcaaactggtgcgttatcttgatttttaaaaagtaataaatcctatgagttccagtattaacacttgccagttctggatcctcacacccattggctgagcgcattcaagcaccaatcgaagccaggttcatctctgagctgctgaaaggaggtgtgaggcttaggaaattggagcctgtgttgcccacgaaaggaaagaataaggaagaaatgtggtatggaagcggctacttgctgctttattttcccacctgttagacattcctccacagtgatttggccagttgtatttcacggtaatggaactagatagtgttttccattggctttctctggtagctcttggtcagctcctgagttaacaggatgtggcagcatccctgttcttccttcacgtcctcaccctctgcctccagcagtggaagggaacagccctcatgaggactgcttcctactgcagctcctgctttttgctcatacatttaaaaaactatttctcaagcttcccctccttttggggggaggagctgatagtaggaggccattccttccacctccaacttataccctctaagtctaaggtgaaggaaagattcagaataaatccaacttgtttatagaaaagttcttgttagtccttagacctcatctcaactgctctgttgaaggtaatgatttattggggggaaaaaacaacgccaatttatcctctctgtattaaagtgataattctgggcccacagaaatcagtcagtacctgcggtgtgccttaaggggactctcatgatcatcattcccttctagagaacattctagatgaagaaatgcaactgttgaccttctggttcacccatctccccctcgaggcattcttgataccccttctcacctgcatttctgtcccagggataccagatgcagccactacctaactaggcttgtcctgggggagtgagccgtgaacctggagacatggctttgacccacagctactgttcatttcctcaggctttgcgctgattccctcaataatatgacagtaaggcaagtagtctccttgcctttctcctgaaaggtatgagatgtggacatttcagtgtttgaattattttaagagatgttttatagaaataaaacgttttgtagctaagaattttccctttctcttaatttcttacatctttccacacaaacttatctttccaagaatttgaggtggtgatcatacccatcaagacggccttgtaggctatctgattgctaacagacacgacctagagcttctgcccaaattcccacacaagcattatctcgtttaacatctcagcgacatactggataccagaataatgtttcctcttctctggtgcaccaaaacctgcccttagtgataatctctcaattatgacattcatttgagtttagggtgtataatttttcct

SEQ ID NO: 4608 - protein, 485 aa, Homosapiens; identical to SEQ ID NO: 656

SEQ ID NO: 4609 - DNA, 4955 bp, Homosapiens
agatttgggcgggctaggagggtttgggtcttcaggtcacatctggacggagagacctccggggcctccgttggtcggtccttccgctccggataccgttccggatgtcaggtagttcaggtcccgccccgacgccggccgtgacgaaggcacgccggggtgacctcaccctccaacatggcggcggcggtagattagggccgcgggtcggagcactcaccgccgctgggggaccctgtcggaagcaactgccgccgccgcctctttcatctcttctggggcaggggccagggccaggttttacacatccataagtagacctttttggagcctcaccagccaattcaatggcgtcctcttctactgtgcctctgggatttcactatgaaacaaagtatgttgttctcagctacttgggactcctctctcaagagaagctgcaagagcaacatctttcctcaccccaaggggttcaactagatatagcttcacaatctctggatcaagaaattttattaaaagttaaaactgaaattgaagaagagctaaaatctctggacaaagaaatttctgaagattttggtgcctctggttttgctacgacaaatgcttttggaattgacaagacgtggtcaagaacctttgagcgcactgctgcagtttggcgtgacatacctggaggactattcggcagagtacatcattcagcaaggtggctggggcactgtgtttagtcttgagtcagaggaggaggaataccctggaatcactgcagaagatagcaatgacatttacatcctgcccagcgacaactctggacaagtcagtcccccagagtctccaactgtgaccacttcctggcagtctgagagcttacctgtgtcactgtcagctagccagagttggcacacagaaagcctgccagtgtcactaggccctgagtcctggcagcagattgcaatggatcctgaagaagtgaaaagcttagacagcaacggagctggagagaagagtgagaacaactcctctaattctgacattgtgcacgtggagaaagaagaggtgcccgagggcatggaagaggctgctgtggcttctgtggtcttgccagcgcgggagctgcaagaggcacttcctgaagccccagctcccttgcttccacatatcactgccacctccctgctggggacaagggaacctgacacagaagtgatcacagttgagaaatccagccctgctacatctctgtttgtagaacttgatgaagaagaggtgaaagcagcaacaactgaacctactgaagtggaggaggtggtccccgcactggaacccacagaaacgctgctgagtgagaaggagataaacgcaagggaagagagccttgtggaagagctgtcccctgccagcgagaagaagcccgtgccgccgtctgagggcaagtctagactgtcccccgccggtgagatgaagcccatgccgctgtctgagggcaagtctatactgctgtttggaggggctgctgctgttgccatcctggcagtggccatcggggtagccctggctctgagaaagaaataggaggcttttcagaagagaaagacagaaggatgtaaggttggagttgtattggctggaatttgaacctccagcagctgtctggacatttgtggaacactctgggataattggggacttctgctcaacatggcagtggcatgttaggcatgttagggcttgaggtggggcattcacattcatctgactgtaaatcccaagggcctccgctcatgctaaattgagaatcttaggggtaaagcaccccctccaggaccgggtttctcagccttggcactagtgctgttctgaccattctctgtgttggggctgtcctgtgtgtggtgggctccacccactagatgccagtggcaccccctcccagagatgacaaacgaaaatgtctctagacattgccaaatgtcccgtgtgaacatcccctattgagacccactgctttagcgagagagggtttacttaggaagaattgggatagaaattcccagctgagagaacttagctgtgggctcctcagctactgacttcttagctcttaatccccttagaatttcatctttctcgatgagcaggctctgcacccactctttttttgccccccgccctcatcctggagtgtgagggtgctcgcccgtactctcagctgcctctcagggactgcactgttcctcttcacccccaggttcctgctaagatcccacgggcgagggcttgctctggactcagtctgtcaagtccccgaagcttcctgcagctccaccttgtaaaaatgctgcctttgggaatcttcgaaatatgtacacagagaaaatcacatgaaggagacctggggtccccacttgtgagtgcaactgcaagtaactctggctagagagacacatgtgtcttgtgtcaaggcaggaggataacctggatgaccttctgaggtctcttcagcccttttcgctagtggtcacccaccaccatggttacttgccagcaacatctctattgctggatggtccctgtctataaccttgggctagtatattttttccaatatgggaccttagtcttactactgatgagttctatgggtctcttgctagggggtaaggatttttattcttgggcttatagagccagttagatcataattcttatgaaatagagagtgtcctaaatatcactgaaataaaaagtaggaaaaagaagcttgaattttaagactgaggctgctctgcagattctagtttggctttcagagttcaagagtggtggcatcttcacctgaattcttcaatgccagggtaataaaccaaaatagtcctaatcagtatatgctagttgagcatcggcataattttctttcctctggctgatcccagccctaaaggaagggtagacccgtgtctttccagccctaaaggaagggtagacccgtgtctttccagccctaaaggaagggcagacccgtgtctttccatgcccgagggccacgacgtcactatgcagggcacacgtggcttggtttaaaaaggtcatcttagatttatcttagtaaatgtaataaattattttttagatcttgaaatttataataaaaatactttacctaccctgatcaccaaaacctgatgttttaaatgtgctttctttttgaaatttatgttttcaaataaaatctccctaaagcaatatttaaaaattggtcaaaacaaggtctgggagtatgtttgtgtgtctttccagctttatcctgtagcgtgtctttgttctgtgttttagtgtcccatttagggagtgatgttttaagggtttttgtgtacttggattaagtaattagaggtgagtggggggaatgggattattgaggcaatgatttttttcttcatgggctctgatagttgcattgattgttctgtattctaattgctatatttgtgtttgcataggtgaagagcaaactggtgcgttatcttgatttttaaaaagtaataaatcctatgagttccagtattaacacttgccagttctggatcctcacacccattggctgagcgcattcaagcaccaatcgaagccaggttcatctctgagctgctgaaaggaggtgtgaggcttaggaaattggagcctgtgttgcccacgaaaggaaagaataaggaagaaatgtggtatggaagcggctacttgctgctttattttcccacctgttagacattcctccacagtgatttggccagttgtatttcacggtaatggaactagatagtgttttccattggctttctctggtagctcttggtcagctcctgagttaacaggatgtggcagcatccctgttcttccttcacgtcctcaccctctgcctccagcagtggaagggaacagccctcatgaggactgcttcctactgcagctcctgctttttgctcatacatttaaaaaactatttctcaagcttcccctccttttggggggaggagctgatagtaggaggccattccttccacctccaacttataccctctaagtctaaggtgaaggaaagattcagaataaatccaacttgtttatagaaaagttcttgttagtccttagacctcatctcaactgctctgttgaaggtaatgatttattggggggaaaaaacaacgccaatttatcctctctgtattaaagtgataattctgggcccacagaaatcagtcagtacctgcggtgtgccttaaggggactctcatgatcatcattcccttctagagaacattctagatgaagaaatgcaactgttgaccttctggttcacccatctccccctcgaggcattcttgataccccttctcacctgcatttctgtcccagggataccagatgcagccactacctaactaggcttgtcctgggggagtgagccgtgaacctggagacatggctttgacccacagctactgttcatttcctcaggctttgcgctgattccctcaataatatgacagtaaggcaagtagtctccttgcctttctcctgaaaggtatgagatgtggacatttcagtgtttgaattattttaagagatgttttatagaaataaaacgttttgtagctaagaattttccctttctcttaatttcttacatctttccacacaaacttatctttccaagaatttgaggtggtgatcatacccatcaagacggccttgtaggctatctgattgctaacagacacgacctagagcttctgcccaaattcccacacaagcattatctcgtttaacatctcagcgacatactggataccagaataatgtttcctcttctctggtgcaccaaaacctgcccttagtgataatctctcaattatgacattcatttgagtttagggtgtataatttttcct

SEQ ID NO: 4610 - protein, 323 aa, Homosapiens; identical to SEQ ID NO: 4582

SEQ ID NO: 4611 - DNA, 4968 bp, Homosapiens
agatttgggcgggctaggagggtttgggtcttcaggtcacatctggacggagagacctccggggcctccgttggtcggtccttccgctccggataccgttccggatgtcaggtagttcaggtcccgccccgacgccggccgtgacgaaggcacgccggggtgacctcaccctccaacatggcggcggcggtagattagggccgcgggtcggagcactcaccgccgctgggggaccctgtcggaagcaactgccgccgccgcctctttcatctcttctggggcaggggccagggccaggttttacacatccataagtagacctttttggagcctcaccagccaattcaatggcgtcctcttctactgtgcctctgggatttcactatgaaacaaagtatgttgttctcagctacttgggactcctctctcaagagaagctgcaagagcaacatctttcctcaccccaaggggttcaactagatatagcttcacaatctctggatcaagaaattttattaaaagttaaaactgaaattgaagaagagctaaaatctctggacaaagaaatttctgaagccttcaccagcacaggctttgaccgtcacacttctccagtgttcagccctgccaatccagaaagctcaatggaagactgcttggcccatcttggagaaaaagtgtcccaggaactgaaagagcctctccataaagcattgcaaatgctcctgagccaggcactgtgtttagtcttgagtcagaggaggaggaataccctggaatcactgcagaagatagcaatgacatttacatcctgcccagcgacaactctggacaagtcagtcccccagagtctccaactgtgaccacttcctggcagtctgagagcttacctgtgtcactgtcagctagccagagttggcacacagaaagcctgccagtgtcactaggccctgagtcctggcagcagattgcaatggatcctgaagaagtgaaaagcttagacagcaacggagctggagagaagagtgagaacaactcctctaattctgacattgtgcacgtggagaaagaagaggtgcccgagggcatggaagaggctgctgtggcttctgtggtcttgccagcgcgggagctgcaagaggcacttcctgaagccccagctcccttgcttccacatatcactgccacctccctgctggggacaagggaacctgacacagaagtgatcacagttgagaaatccagccctgctacatctctgtttgtagaacttgatgaagaagaggtgaaagcagcaacaactgaacctactgaagtggaggaggtggtccccgcactggaacccacagaaacgctgctgagtgagaaggagataaacgcaagggaagagagccttgtggaagagctgtcccctgccagcgagaagaagcccgtgccgccgtctgagggcaagtctagactgtcccccgccggtgagatgaagcccatgccgctgtctgagggcaagtctatactgctgtttggaggggctgctgctgttgccatcctggcagtggccatcggggtagccctggctctgagaaagaaataggaggcttttcagaagagaaagacagaaggatgtaaggttggagttgtattggctggaatttgaacctccagcagctgtctggacatttgtggaacactctgggataattggggacttctgctcaacatggcagtggcatgttaggcatgttagggcttgaggtggggcattcacattcatctgactgtaaatcccaagggcctccgctcatgctaaattgagaatcttaggggtaaagcaccccctccaggaccgggtttctcagccttggcactagtgctgttctgaccattctctgtgttggggctgtcctgtgtgtggtgggctccacccactagatgccagtggcaccccctcccagagatgacaaacgaaaatgtctctagacattgccaaatgtcccgtgtgaacatcccctattgagacccactgctttagcgagagagggtttacttaggaagaattgggatagaaattcccagctgagagaacttagctgtgggctcctcagctactgacttcttagctcttaatccccttagaatttcatctttctcgatgagcaggctctgcacccactctttttttgccccccgccctcatcctggagtgtgagggtgctcgcccgtactctcagctgcctctcagggactgcactgttcctcttcacccccaggttcctgctaagatcccacgggcgagggcttgctctggactcagtctgtcaagtccccgaagcttcctgcagctccaccttgtaaaaatgctgcctttgggaatcttcgaaatatgtacacagagaaaatcacatgaaggagacctggggtccccacttgtgagtgcaactgcaagtaactctggctagagagacacatgtgtcttgtgtcaaggcaggaggataacctggatgaccttctgaggtctcttcagcccttttcgctagtggtcacccaccaccatggttacttgccagcaacatctctattgctggatggtccctgtctataaccttgggctagtatattttttccaatatgggaccttagtcttactactgatgagttctatgggtctcttgctagggggtaaggatttttattcttgggcttatagagccagttagatcataattcttatgaaatagagagtgtcctaaatatcactgaaataaaaagtaggaaaaagaagcttgaattttaagactgaggctgctctgcagattctagtttggctttcagagttcaagagtggtggcatcttcacctgaattcttcaatgccagggtaataaaccaaaatagtcctaatcagtatatgctagttgagcatcggcataattttctttcctctggctgatcccagccctaaaggaagggtagacccgtgtctttccagccctaaaggaagggtagacccgtgtctttccagccctaaaggaagggcagacccgtgtctttccatgcccgagggccacgacgtcactatgcagggcacacgtggcttggtttaaaaaggtcatcttagatttatcttagtaaatgtaataaattattttttagatcttgaaatttataataaaaatactttacctaccctgatcaccaaaacctgatgttttaaatgtgctttctttttgaaatttatgttttcaaataaaatctccctaaagcaatatttaaaaattggtcaaaacaaggtctgggagtatgtttgtgtgtctttccagctttatcctgtagcgtgtctttgttctgtgttttagtgtcccatttagggagtgatgttttaagggtttttgtgtacttggattaagtaattagaggtgagtggggggaatgggattattgaggcaatgatttttttcttcatgggctctgatagttgcattgattgttctgtattctaattgctatatttgtgtttgcataggtgaagagcaaactggtgcgttatcttgatttttaaaaagtaataaatcctatgagttccagtattaacacttgccagttctggatcctcacacccattggctgagcgcattcaagcaccaatcgaagccaggttcatctctgagctgctgaaaggaggtgtgaggcttaggaaattggagcctgtgttgcccacgaaaggaaagaataaggaagaaatgtggtatggaagcggctacttgctgctttattttcccacctgttagacattcctccacagtgatttggccagttgtatttcacggtaatggaactagatagtgttttccattggctttctctggtagctcttggtcagctcctgagttaacaggatgtggcagcatccctgttcttccttcacgtcctcaccctctgcctccagcagtggaagggaacagccctcatgaggactgcttcctactgcagctcctgctttttgctcatacatttaaaaaactatttctcaagcttcccctccttttggggggaggagctgatagtaggaggccattccttccacctccaacttataccctctaagtctaaggtgaaggaaagattcagaataaatccaacttgtttatagaaaagttcttgttagtccttagacctcatctcaactgctctgttgaaggtaatgatttattggggggaaaaaacaacgccaatttatcctctctgtattaaagtgataattctgggcccacagaaatcagtcagtacctgcggtgtgccttaaggggactctcatgatcatcattcccttctagagaacattctagatgaagaaatgcaactgttgaccttctggttcacccatctccccctcgaggcattcttgataccccttctcacctgcatttctgtcccagggataccagatgcagccactacctaactaggcttgtcctgggggagtgagccgtgaacctggagacatggctttgacccacagctactgttcatttcctcaggctttgcgctgattccctcaataatatgacagtaaggcaagtagtctccttgcctttctcctgaaaggtatgagatgtggacatttcagtgtttgaattattttaagagatgttttatagaaataaaacgttttgtagctaagaattttccctttctcttaatttcttacatctttccacacaaacttatctttccaagaatttgaggtggtgatcatacccatcaagacggccttgtaggctatctgattgctaacagacacgacctagagcttctgcccaaattcccacacaagcattatctcgtttaacatctcagcgacatactggataccagaataatgtttcctcttctctggtgcaccaaaacctgcccttagtgataatctctcaattatgacattcatttgagtttagggtgtataatttttcct

SEQ ID NO: 4612 - protein, 171 aa, Homosapiens; identical to SEQ ID NO: 4588

SEQ ID NO: 4613 - DNA, 3050 bp, Homosapiens
gcggtagattagggccgcgggtcggagcactcaccgccgctgggggaccctgtcggaagcaactgccgccgccgcctctttcatctcttctggggcaggggccagggccaggggttcaactagatatagcttcacaatctctggatcaagaaattttattaaaagttaaaactgaaattgaagaagagctaaaatctctggacaaagaaatttctgaagccttcaccagcacaggctttgaccgtcacacttctccagtgttcagccctgccaatccagaaagctcaatggaagactgcttggcccatcttggagaaaaagtgtcccaggaactgaaagagcctctccataaagcattgcaaatgctcctgagccagccagtgacatatcaggcatttcgggaatgtacactggagaccacagttcatgccagcggctggaataagattttggtgcctctggttttgctacgacaaatgcttttggaattgacaagacgtggtcaagaacctttgagcgcactgctgcagtttggcgtgacatacctggaggactattcggcagagtacatcattcagcaaggtggctggggcactgtgtttagtcttgagtcagaggaggaggaataccctggaatcactgcagaagatagcaatgacatttacatcctgcccagcgacaactctggacaagtcagtcccccagagtctccaactgtgaccacttcctggcagtctgagagcttacctgtgtcactgtcagctagccagagttggcacacagaaagcctgccagtgtcactaggccctgagtcctggcagcagattgcaatggatcctgaagaagtgaaaagcttagacagcaacggagctggagagaagagtgagaacaactcctctaattctgacattgtgcacgtggagaaagaagaggtgcccgagggcatggaagaggctgctgtggcttctgtggtcttgccagcgcgggagctgcaagaggcacttcctgaagccccagctcccttgcttccacatatcactgccacctccctgctggggacaagggaacctgacacagaagtgatcacagttgagaaatccagccctgctacatctctgtttgtagaacttgatgaagaagaggtgaaagcagcaacaactgaacctactgaagtggaggaggtggtccccgcactggaacccacagaaacgctgctgagtgagaaggagataaacgcaagggaagagagccttgtggaagagctgtcccctgccagcgagaagaagcccgtgccgccgtctgagggcaagtctagactgtcccccgccggtgagatgaagcccatgccgctgtctgagggcaagtctatactgctgtttggaggggctgctgctgttgccatcctggcagtggccatcggggtagccctggctctgagaaagaaataggaggcttttcagaagagaaagacagaaggatgtaaggttggagttgtattggctggaatttgaacctccagcagctgtctggacatttgtggaacactctgggataattggggacttctgctcaacatggcagtggcatgttaggcatgttagggcttgaggtggggcattcacattcatctgactgtaaatcccaagggcctccgctcatgctaaattgagaatcttaggggtaaagcaccccctccaggaccgggtttctcagccttggcactagtgctgttctgaccattctctgtgttggggctgtcctgtgtgtggtgggctccacccactagatgccagtggcaccccctcccagagatgacaaacgaaaatgtctctagacattgccaaatgtcccgtgtgaacatcccctattgagacccactgctttagcgagagagggtttacttaggaagaattgggatagaaattcccagctgagagaacttagctgtgggctcctcagctactgacttcttagctcttaatccccttagaatttcatctttctcgatgagcaggctctgcacccactctttttttgccccccgccctcatcctggagtgtgagggtgctcgcccgtactctcagctgcctctcagggactgcactgttcctcttcacccccaggttcctgctaagatcccacgggcgagggcttgctctggactcagtctgtcaagtccccgaagcttcctgcagctccaccttgtaaaaatgctgcctttgggaatcttcgaaatatgtacacagagaaaatcacatgaaggagacctggggtccccacttgtgagtgcaactgcaagtaactctggctagagagacacatgtgtcttgtgtcaaggcaggaggataacctggatgaccttctgaggtctcttcagcccttttcgctagtggtcacccaccaccatggttacttgccagcaacatctctattgctggatggtccctgtctataaccttgggctagtatattttttccaatatgggaccttagtcttactactgatgagttctatgggtctcttgctagggggtaaggatttttattcttgggcttatagagccagttagatcataattcttatgaaatagagagtgtcctaaatatcactgaaataaaaagtaggaaaaagaagcttgaattttaagactgaggctgctctgcagattctagtttggctttcagagttcaagagtggtggcatcttcacctgaattcttcaatgccagggtaataaaccaaaatagtcctaatcagtatatgctagttgagcatcggcataattttctttcctctggctgatcccagccctaaaggaagggtagacccgtgtctttccagccctaaaggaagggtagacccgtgtctttccagccctaaaggaagggcagacccgtgtctttccatgcccgagggccacgacgtcactatgcagggcacacgtggcttggtttaaaaaggtcatcttagatttatcttagtaaatgtaataaattattttttagatcttgaaatttataataaaaatactttacctaccctgatcacc

SEQ ID NO: 4614 - protein, 386 aa, Homosapiens
MEDCLAHLGEKVSQELKEPLHKALQMLLSQPVTYQAFRECTLETTVHASGWNKILVPLVLLRQMLLELTRRGQEPLSALLQFGVTYLEDYSAEYIIQQGGWGTVFSLESEEEEYPGITAEDSNDIYILPSDNSGQVSPPESPTVTTSWQSESLPVSLSASQSWHTESLPVSLGPESWQQIAMDPEEVKSLDSNGAGEKSENNSSNSDIVHVEKEEVPEGMEEAAVASVVLPARELQEALPEAPAPLLPHITATSLLGTREPDTEVITVEKSSPATSLFVELDEEEVKAATTEPTEVEEVVPALEPTETLLSEKEINAREESLVEELSPASEKKPVPPSEGKSRLSPAGEMKPMPLSEGKSILLFGGAAAVAILAVAIGVALALRKK

SEQ ID NO: 4615 - DNA, 3140 bp, Homosapiens
gcggtagattagggccgcgggtcggagcactcaccgccgctgggggaccctgtcggaagcaactgccgccgccgcctctttcatctcttctggggcaggggccagggccaggggttcaactagatatagcttcacaatctctggatcaagaaattttattaaaagttaaaactgaaattgaagaagagctaaaatctctggacaaagaaatttctgaagccttcaccagcacaggctttgaccgtcacacttctccagtgttcagccctgccaatccagaaagctcaatggaagactgcttggcccatcttggagaaaaagtgtcccaggaactgaaagagcctctccataaagcattgcaaatgctcctgagccagccagtgacatatcaggcatttcgggaatgtacactggagaccacagttcatgccagcggctggaataagattttggtgcctctggttttgctacgacaaatgcttttggaattgacaagacgtggtcaagaacctttgagcgcactgctgcagtttggcgtgacatacctggaggactattcggcagagtacatcattcagcaaggtggctggggcactgtgtttagtcttgagtcagaggaggaggaataccctggaatcactgcagaagatagcaatgacatttacatcctgcccagcgacaactctggacaagtcagtcccccagagtctccaactgtgaccacttcctggcagtctgagagcttacctgtgtcactgtcagctagccagagttggcacacagaaagcctgccagtgtcactaggccctgagtcctggcagcagattgcaatggatcctgaagaagtgaaaagcttagacagcaacggagctggagagaagagtgagaacaactcctctaattctgacattgtgcacgtggagaaagaagaggtgcccgagggcatggaagaggctgctgtggcttctgtggtcttgccagcgcgggagctgcaagaggcacttcctgaagccccagctcccttgcttccacatatcactgccacctccctgctggggacaagggaacctgacacagaagtgatcacagttgagaaatccagccctgctacatctctgtttgtagaacttgatgaagaagaggtgaaagcagcaacaactgaacctactgaagtggaggaggtggtccccgcactggaacccacagaaacgctgctgagtgagaaggagataaacgcaagggaagagagccttgtggaagagctgtcccctgccagcgagaagaagcccgtgccgccgtctgagggcaagtctagactgtcccccgccggtgagatgaagcccatgccgctgtctgagggcaagtctatactgctgtttggaggggctgctgctgttgccatcctggcagtggccatcggggtagccctggctctgagaaagaaataggaggcttttcagaagagaaagacagaaggatgtaaggttggagttgtattggctggaatttgaacctccagcagctgtctggacatttgtggaacactctgggataattggggacttctgctcaacatggcagtggcatgttaggcatgttagggcttgaggtggggcattcacattcatctgactgtaaatcccaagggcctccgctcatgctaaattgagaatcttaggggtaaagcaccccctccaggaccgggtttctcagccttggcactagtgctgttctgaccattctctgtgttggggctgtcctgtgtgtggtgggctccacccactagatgccagtggcaccccctcccagagatgacaaacgaaaatgtctctagacattgccaaatgtcccgtgtgaacatcccctattgagacccactgctttagcgagagagggtttacttaggaagaattgggatagaaattcccagctgagagaacttagctgtgggctcctcagctactgacttcttagctcttaatccccttagaatttcatctttctcgatgagcaggctctgcacccactctttttttgccccccgccctcatcctggagtgtgagggtgctcgcccgtactctcagctgcctctcagggactgcactgttcctcttcacccccaggttcctgctaagatcccacgggcgagggcttgctctggactcagtctgtcaagtccccgaagcttcctgcagctccaccttgtaaaaatgctgcctttgggaatcttcgaaatatgtacacagagaaaatcacatgaaggagacctggggtccccacttgtgagtgcaactgcaagtaactctggctagagagacacatgtgtcttgtgtcaaggcaggaggataacctggatgaccttctgaggtctcttcagcccttttcgctagtggtcacccaccaccatggttacttgccagcaacatctctattgctggatggtccctgtctataaccttgggctagtatattttttccaatatgggaccttagtcttactactgatgagttctatgggtctcttgctagggggtaaggatttttattcttgggcttatagagccagttagatcataattcttatgaaatagagagtgtcctaaatatcactgaaataaaaagtaggaaaaagaagcttgaattttaagactgaggctgctctgcagattctagtttggctttcagagttcaagagtggtggcatcttcacctgaattcttcaatgccagggtaataaaccaaaatagtcctaatcagtatatgctagttgagcatcggcataattttctttcctctggctgatcccagccctaaaggaagggtagacccgtgtctttccagccctaaaggaagggtagacccgtgtctttccagccctaaaggaagggcagacccgtgtctttccatgcccgagggccacgacgtcactatgcagggcacacgtggcttggtttaaaaaggtcatcttagatttatcttagtaaatgtaataaattattttttagatcttgaaatttataataaaaatactttacctaccctgatcaccaaaacctgatgttttaaatgtgctttctttttgaaatttatgttttcaaataaaatctccctaaagcaatatttaaaaattggtcaaaac

SEQ ID NO: 4616 - protein, 386 aa, Homosapiens; identical to SEQ ID NO: 4614

SEQ ID NO: 4617 - DNA, 4534 bp, Homosapiens
gcggtagattagggccgcgggtcggagcactcaccgccgctgggggaccctgtcggaagcaactgccgccgccgcctctttcatctcttctggggcaggggccagggccaggggttcaactagatatagcttcacaatctctggatcaagaaattttattaaaagttaaaactgaaattgaagaagagctaaaatctctggacaaagaaatttctgaagccttcaccagcacaggctttgaccgtcacacttctccagtgttcagccctgccaatccagaaagctcaatggaagactgcttggcccatcttggagaaaaagtgtcccaggaactgaaagagcctctccataaagcattgcaaatgctcctgagccagccagtgacatatcaggcatttcgggaatgtacactggagaccacagttcatgccagcggctggaataagattttggtgcctctggttttgctacgacaaatgcttttggaattgacaagacgtggtcaagaacctttgagcgcactgctgcagtttggcgtgacatacctggaggactattcggcagagtacatcattcagcaaggtggctggggcactgtgtttagtcttgagtcagaggaggaggaataccctggaatcactgcagaagatagcaatgacatttacatcctgcccagcgacaactctggacaagtcagtcccccagagtctccaactgtgaccacttcctggcagtctgagagcttacctgtgtcactgtcagctagccagagttggcacacagaaagcctgccagtgtcactaggccctgagtcctggcagcagattgcaatggatcctgaagaagtgaaaagcttagacagcaacggagctggagagaagagtgagaacaactcctctaattctgacattgtgcacgtggagaaagaagaggtgcccgagggcatggaagaggctgctgtggcttctgtggtcttgccagcgcgggagctgcaagaggcacttcctgaagccccagctcccttgcttccacatatcactgccacctccctgctggggacaagggaacctgacacagaagtgatcacagttgagaaatccagccctgctacatctctgtttgtagaacttgatgaagaagaggtgaaagcagcaacaactgaacctactgaagtggaggaggtggtccccgcactggaacccacagaaacgctgctgagtgagaaggagataaacgcaagggaagagagccttgtggaagagctgtcccctgccagcgagaagaagcccgtgccgccgtctgagggcaagtctagactgtcccccgccggtgagatgaagcccatgccgctgtctgagggcaagtctatactgctgtttggaggggctgctgctgttgccatcctggcagtggccatcggggtagccctggctctgagaaagaaataggaggcttttcagaagagaaagacagaaggatgtaaggttggagttgtattggctggaatttgaacctccagcagctgtctggacatttgtggaacactctgggataattggggacttctgctcaacatggcagtggcatgttaggcatgttagggcttgaggtggggcattcacattcatctgactgtaaatcccaagggcctccgctcatgctaaattgagaatcttaggggtaaagcaccccctccaggaccgggtttctcagccttggcactagtgctgttctgaccattctctgtgttggggctgtcctgtgtgtggtgggctccacccactagatgccagtggcaccccctcccagagatgacaaacgaaaatgtctctagacattgccaaatgtcccgtgtgaacatcccctattgagacccactgctttagcgagagagggtttacttaggaagaattgggatagaaattcccagctgagagaacttagctgtgggctcctcagctactgacttcttagctcttaatccccttagaatttcatctttctcgatgagcaggctctgcacccactctttttttgccccccgccctcatcctggagtgtgagggtgctcgcccgtactctcagctgcctctcagggactgcactgttcctcttcacccccaggttcctgctaagatcccacgggcgagggcttgctctggactcagtctgtcaagtccccgaagcttcctgcagctccaccttgtaaaaatgctgcctttgggaatcttcgaaatatgtacacagagaaaatcacatgaaggagacctggggtccccacttgtgagtgcaactgcaagtaactctggctagagagacacatgtgtcttgtgtcaaggcaggaggataacctggatgaccttctgaggtctcttcagcccttttcgctagtggtcacccaccaccatggttacttgccagcaacatctctattgctggatggtccctgtctataaccttgggctagtatattttttccaatatgggaccttagtcttactactgatgagttctatgggtctcttgctagggggtaaggatttttattcttgggcttatagagccagttagatcataattcttatgaaatagagagtgtcctaaatatcactgaaataaaaagtaggaaaaagaagcttgaattttaagactgaggctgctctgcagattctagtttggctttcagagttcaagagtggtggcatcttcacctgaattcttcaatgccagggtaataaaccaaaatagtcctaatcagtatatgctagttgagcatcggcataattttctttcctctggctgatcccagccctaaaggaagggtagacccgtgtctttccagccctaaaggaagggtagacccgtgtctttccagccctaaaggaagggcagacccgtgtctttccatgcccgagggccacgacgtcactatgcagggcacacgtggcttggtttaaaaaggtcatcttagatttatcttagtaaatgtaataaattattttttagatcttgaaatttataataaaaatactttacctaccctgatcaccaaaacctgatgttttaaatgtgctttctttttgaaatttatgttttcaaataaaatctccctaaagcaatatttaaaaattggtcaaaacaaggtctgggagtatgtttgtgtgtctttccagctttatcctgtagcgtgtctttgttctgtgttttagtgtcccatttagggagtgatgttttaagggtttttgtgtacttggattaagtaattagaggtgagtggggggaatgggattattgaggcaatgatttttttcttcatgggctctgatagttgcattgattgttctgtattctaattgctatatttgtgtttgcataggtgaagagcaaactggtgcgttatcttgatttttaaaaagtaataaatcctatgagttccagtattaacacttgccagttctggatcctcacacccattggctgagcgcattcaagcaccaatcgaagccaggttcatctctgagctgctgaaaggaggtgtgaggcttaggaaattggagcctgtgttgcccacgaaaggaaagaataaggaagaaatgtggtatggaagcggctacttgctgctttattttcccacctgttagacattcctccacagtgatttggccagttgtatttcacggtaatggaactagatagtgttttccattggctttctctggtagctcttggtcagctcctgagttaacaggatgtggcagcatccctgttcttccttcacgtcctcaccctctgcctccagcagtggaagggaacagccctcatgaggactgcttcctactgcagctcctgctttttgctcatacatttaaaaaactatttctcaagcttcccctccttttggggggaggagctgatagtaggaggccattccttccacctccaacttataccctctaagtctaaggtgaaggaaagattcagaataaatccaacttgtttatagaaaagttcttgttagtccttagacctcatctcaactgctctgttgaaggtaatgatttattggggggaaaaaacaacgccaatttatcctctctgtattaaagtgataattctgggcccacagaaatcagtcagtacctgcggtgtgccttaaggggactctcatgatcatcattcccttctagagaacattctagatgaagaaatgcaactgttgaccttctggttcacccatctccccctcgaggcattcttgataccccttctcacctgcatttctgtcccagggataccagatgcagccactacctaactaggcttgtcctgggggagtgagccgtgaacctggagacatggctttgacccacagctactgttcatttcctcaggctttgcgctgattccctcaataatatgacagtaaggcaagtagtctccttgcctttctcctgaaaggtatgagatgtggacatttcagtgtttgaattattttaagagatgttttatagaaataaaacgttttgtagctaag

SEQ ID NO: 4618 - protein, 386 aa, Homosapiens; identical to SEQ ID NO: 4614

SEQ ID NO: 4619 - DNA, 4825 bp, Homosapiens
gcggtagattagggccgcgggtcggagcactcaccgccgctgggggaccctgtcggaagcaactgccgccgccgcctctttcatctcttctggggcaggggccagggccaggggttcaactagatatagcttcacaatctctggatcaagaaattttattaaaagttaaaactgaaattgaagaagagctaaaatctctggacaaagaaatttctgaagccttcaccagcacaggctttgaccgtcacacttctccagtgttcagccctgccaatccagaaagctcaatggaagactgcttggcccatcttggagaaaaagtgtcccaggaactgaaagagcctctccataaagcattgcaaatgctcctgagccagccagtgacatatcaggcatttcgggaatgtacactggagaccacagttcatgccagcggctggaataagattttggtgcctctggttttgctacgacaaatgcttttggaattgacaagacgtggtcaagaacctttgagcgcactgctgcagtttggcgtgacatacctggaggactattcggcagagtacatcattcagcaaggtggctggggcactgtgtttagtcttgagtcagaggaggaggaataccctggaatcactgcagaagatagcaatgacatttacatcctgcccagcgacaactctggacaagtcagtcccccagagtctccaactgtgaccacttcctggcagtctgagagcttacctgtgtcactgtcagctagccagagttggcacacagaaagcctgccagtgtcactaggccctgagtcctggcagcagattgcaatggatcctgaagaagtgaaaagcttagacagcaacggagctggagagaagagtgagaacaactcctctaattctgacattgtgcacgtggagaaagaagaggtgcccgagggcatggaagaggctgctgtggcttctgtggtcttgccagcgcgggagctgcaagaggcacttcctgaagccccagctcccttgcttccacatatcactgccacctccctgctggggacaagggaacctgacacagaagtgatcacagttgagaaatccagccctgctacatctctgtttgtagaacttgatgaagaagaggtgaaagcagcaacaactgaacctactgaagtggaggaggtggtccccgcactggaacccacagaaacgctgctgagtgagaaggagataaacgcaagggaagagagccttgtggaagagctgtcccctgccagcgagaagaagcccgtgccgccgtctgagggcaagtctagactgtcccccgccggtgagatgaagcccatgccgctgtctgagggcaagtctatactgctgtttggaggggctgctgctgttgccatcctggcagtggccatcggggtagccctggctctgagaaagaaataggaggcttttcagaagagaaagacagaaggatgtaaggttggagttgtattggctggaatttgaacctccagcagctgtctggacatttgtggaacactctgggataattggggacttctgctcaacatggcagtggcatgttaggcatgttagggcttgaggtggggcattcacattcatctgactgtaaatcccaagggcctccgctcatgctaaattgagaatcttaggggtaaagcaccccctccaggaccgggtttctcagccttggcactagtgctgttctgaccattctctgtgttggggctgtcctgtgtgtggtgggctccacccactagatgccagtggcaccccctcccagagatgacaaacgaaaatgtctctagacattgccaaatgtcccgtgtgaacatcccctattgagacccactgctttagcgagagagggtttacttaggaagaattgggatagaaattcccagctgagagaacttagctgtgggctcctcagctactgacttcttagctcttaatccccttagaatttcatctttctcgatgagcaggctctgcacccactctttttttgccccccgccctcatcctggagtgtgagggtgctcgcccgtactctcagctgcctctcagggactgcactgttcctcttcacccccaggttcctgctaagatcccacgggcgagggcttgctctggactcagtctgtcaagtccccgaagcttcctgcagctccaccttgtaaaaatgctgcctttgggaatcttcgaaatatgtacacagagaaaatcacatgaaggagacctggggtccccacttgtgagtgcaactgcaagtaactctggctagagagacacatgtgtcttgtgtcaaggcaggaggataacctggatgaccttctgaggtctcttcagcccttttcgctagtggtcacccaccaccatggttacttgccagcaacatctctattgctggatggtccctgtctataaccttgggctagtatattttttccaatatgggaccttagtcttactactgatgagttctatgggtctcttgctagggggtaaggatttttattcttgggcttatagagccagttagatcataattcttatgaaatagagagtgtcctaaatatcactgaaataaaaagtaggaaaaagaagcttgaattttaagactgaggctgctctgcagattctagtttggctttcagagttcaagagtggtggcatcttcacctgaattcttcaatgccagggtaataaaccaaaatagtcctaatcagtatatgctagttgagcatcggcataattttctttcctctggctgatcccagccctaaaggaagggtagacccgtgtctttccagccctaaaggaagggtagacccgtgtctttccagccctaaaggaagggcagacccgtgtctttccatgcccgagggccacgacgtcactatgcagggcacacgtggcttggtttaaaaaggtcatcttagatttatcttagtaaatgtaataaattattttttagatcttgaaatttataataaaaatactttacctaccctgatcaccaaaacctgatgttttaaatgtgctttctttttgaaatttatgttttcaaataaaatctccctaaagcaatatttaaaaattggtcaaaacaaggtctgggagtatgtttgtgtgtctttccagctttatcctgtagcgtgtctttgttctgtgttttagtgtcccatttagggagtgatgttttaagggtttttgtgtacttggattaagtaattagaggtgagtggggggaatgggattattgaggcaatgatttttttcttcatgggctctgatagttgcattgattgttctgtattctaattgctatatttgtgtttgcataggtgaagagcaaactggtgcgttatcttgatttttaaaaagtaataaatcctatgagttccagtattaacacttgccagttctggatcctcacacccattggctgagcgcattcaagcaccaatcgaagccaggttcatctctgagctgctgaaaggaggtgtgaggcttaggaaattggagcctgtgttgcccacgaaaggaaagaataaggaagaaatgtggtatggaagcggctacttgctgctttattttcccacctgttagacattcctccacagtgatttggccagttgtatttcacggtaatggaactagatagtgttttccattggctttctctggtagctcttggtcagctcctgagttaacaggatgtggcagcatccctgttcttccttcacgtcctcaccctctgcctccagcagtggaagggaacagccctcatgaggactgcttcctactgcagctcctgctttttgctcatacatttaaaaaactatttctcaagcttcccctccttttggggggaggagctgatagtaggaggccattccttccacctccaacttataccctctaagtctaaggtgaaggaaagattcagaataaatccaacttgtttatagaaaagttcttgttagtccttagacctcatctcaactgctctgttgaaggtaatgatttattggggggaaaaaacaacgccaatttatcctctctgtattaaagtgataattctgggcccacagaaatcagtcagtacctgcggtgtgccttaaggggactctcatgatcatcattcccttctagagaacattctagatgaagaaatgcaactgttgaccttctggttcacccatctccccctcgaggcattcttgataccccttctcacctgcatttctgtcccagggataccagatgcagccactacctaactaggcttgtcctgggggagtgagccgtgaacctggagacatggctttgacccacagctactgttcatttcctcaggctttgcgctgattccctcaataatatgacagtaaggcaagtagtctccttgcctttctcctgaaaggtatgagatgtggacatttcagtgtttgaattattttaagagatgttttatagaaataaaacgttttgtagctaagaattttccctttctcttaatttcttacatctttccacacaaacttatctttccaagaatttgaggtggtgatcatacccatcaagacggccttgtaggctatctgattgctaacagacacgacctagagcttctgcccaaattcccacacaagcattatctcgtttaacatctcagcgacatactggataccagaataatgtttcctcttctctggtgcaccaaaacctgcccttagtgataatctctcaattatgacattcatttgagtttagggtgtataatttttcct

SEQ ID NO: 4620 - protein, 386 aa, Homosapiens; identical to SEQ ID NO: 4614

SEQ ID NO: 4621 - DNA, 2576 bp, Homosapiens
ttctccctgagtcatccttgctccctccctcctcattctcttttcatttcctgggcttgtgttgctacgttagaagtctgtctgtctcctggaaagggcagagcaagtccactgtgggcactgtgtttagtcttgagtcagaggaggaggaataccctggaatcactgcagaagatagcaatgacatttacatcctgcccagcgacaactctggacaagtcagtcccccagagtctccaactgtgaccacttcctggcagtctgagagcttacctgtgtcactgtcagctagccagagttggcacacagaaagcctgccagtgtcactaggccctgagtcctggcagcagattgcaatggatcctgaagaagtgaaaagcttagacagcaacggagctggagagaagagtgagaacaactcctctaattctgacattgtgcacgtggagaaagaagaggtgcccgagggcatggaagaggctgctgtggcttctgtggtcttgccagcgcgggagctgcaagaggcacttcctgaagccccagctcccttgcttccacatatcactgccacctccctgctggggacaagggaacctgacacagaagtgatcacagttgagaaatccagccctgctacatctctgtttgtagaacttgatgaagaagaggtgaaagcagcaacaactgaacctactgaagtggaggaggtggtccccgcactggaacccacagaaacgctgctgagtgagaaggagataaacgcaagggaagagagccttgtggaagagctgtcccctgccagcgagaagaagcccgtgccgccgtctgagggcaagtctagactgtcccccgccggtgagatgaagcccatgccgctgtctgagggcaagtctatactgctgtttggaggggctgctgctgttgccatcctggcagtggccatcggggtagccctggctctgagaaagaaataggaggcttttcagaagagaaagacagaaggatgtaaggttggagttgtattggctggaatttgaacctccagcagctgtctggacatttgtggaacactctgggataattggggacttctgctcaacatggcagtggcatgttaggcatgttagggcttgaggtggggcattcacattcatctgactgtaaatcccaagggcctccgctcatgctaaattgagaatcttaggggtaaagcaccccctccaggaccgggtttctcagccttggcactagtgctgttctgaccattctctgtgttggggctgtcctgtgtgtggtgggctccacccactagatgccagtggcaccccctcccagagatgacaaacgaaaatgtctctagacattgccaaatgtcccgtgtgaacatcccctattgagacccactgctttagcgagagagggtttacttaggaagaattgggatagaaattcccagctgagagaacttagctgtgggctcctcagctactgacttcttagctcttaatccccttagaatttcatctttctcgatgagcaggctctgcacccactctttttttgccccccgccctcatcctggagtgtgagggtgctcgcccgtactctcagctgcctctcagggactgcactgttcctcttcacccccaggttcctgctaagatcccacgggcgagggcttgctctggactcagtctgtcaagtccccgaagcttcctgcagctccaccttgtaaaaatgctgcctttgggaatcttcgaaatatgtacacagagaaaatcacatgaaggagacctggggtccccacttgtgagtgcaactgcaagtaactctggctagagagacacatgtgtcttgtgtcaaggcaggaggataacctggatgaccttctgaggtctcttcagcccttttcgctagtggtcacccaccaccatggttacttgccagcaacatctctattgctggatggtccctgtctataaccttgggctagtatattttttccaatatgggaccttagtcttactactgatgagttctatgggtctcttgctagggggtaaggatttttattcttgggcttatagagccagttagatcataattcttatgaaatagagagtgtcctaaatatcactgaaataaaaagtaggaaaaagaagcttgaattttaagactgaggctgctctgcagattctagtttggctttcagagttcaagagtggtggcatcttcacctgaattcttcaatgccagggtaataaaccaaaatagtcctaatcagtatatgctagttgagcatcggcataattttctttcctctggctgatcccagccctaaaggaagggtagacccgtgtctttccagccctaaaggaagggtagacccgtgtctttccagccctaaaggaagggcagacccgtgtctttccatgcccgagggccacgacgtcactatgcagggcacacgtggcttggtttaaaaaggtcatcttagatttatcttagtaaatgtaataaattattttttagatcttgaaatttataataaaaatactttacctaccctgatcacc

SEQ ID NO: 4622 - protein, 205 aa, Homosapiens
MDPEEVKSLDSNGAGEKSENNSSNSDIVHVEKEEVPEGMEEAAVASVVLPARELQEALPEAPAPLLPHITATSLLGTREPDTEVITVEKSSPATSLFVELDEEEVKAATTEPTEVEEVVPALEPTETLLSEKEINAREESLVEELSPASEKKPVPPSEGKSRLSPAGEMKPMPLSEGKSILLFGGAAAVAILAVAIGVALALRKK

SEQ ID NO: 4623 - DNA, 2666 bp, Homosapiens
ttctccctgagtcatccttgctccctccctcctcattctcttttcatttcctgggcttgtgttgctacgttagaagtctgtctgtctcctggaaagggcagagcaagtccactgtgggcactgtgtttagtcttgagtcagaggaggaggaataccctggaatcactgcagaagatagcaatgacatttacatcctgcccagcgacaactctggacaagtcagtcccccagagtctccaactgtgaccacttcctggcagtctgagagcttacctgtgtcactgtcagctagccagagttggcacacagaaagcctgccagtgtcactaggccctgagtcctggcagcagattgcaatggatcctgaagaagtgaaaagcttagacagcaacggagctggagagaagagtgagaacaactcctctaattctgacattgtgcacgtggagaaagaagaggtgcccgagggcatggaagaggctgctgtggcttctgtggtcttgccagcgcgggagctgcaagaggcacttcctgaagccccagctcccttgcttccacatatcactgccacctccctgctggggacaagggaacctgacacagaagtgatcacagttgagaaatccagccctgctacatctctgtttgtagaacttgatgaagaagaggtgaaagcagcaacaactgaacctactgaagtggaggaggtggtccccgcactggaacccacagaaacgctgctgagtgagaaggagataaacgcaagggaagagagccttgtggaagagctgtcccctgccagcgagaagaagcccgtgccgccgtctgagggcaagtctagactgtcccccgccggtgagatgaagcccatgccgctgtctgagggcaagtctatactgctgtttggaggggctgctgctgttgccatcctggcagtggccatcggggtagccctggctctgagaaagaaataggaggcttttcagaagagaaagacagaaggatgtaaggttggagttgtattggctggaatttgaacctccagcagctgtctggacatttgtggaacactctgggataattggggacttctgctcaacatggcagtggcatgttaggcatgttagggcttgaggtggggcattcacattcatctgactgtaaatcccaagggcctccgctcatgctaaattgagaatcttaggggtaaagcaccccctccaggaccgggtttctcagccttggcactagtgctgttctgaccattctctgtgttggggctgtcctgtgtgtggtgggctccacccactagatgccagtggcaccccctcccagagatgacaaacgaaaatgtctctagacattgccaaatgtcccgtgtgaacatcccctattgagacccactgctttagcgagagagggtttacttaggaagaattgggatagaaattcccagctgagagaacttagctgtgggctcctcagctactgacttcttagctcttaatccccttagaatttcatctttctcgatgagcaggctctgcacccactctttttttgccccccgccctcatcctggagtgtgagggtgctcgcccgtactctcagctgcctctcagggactgcactgttcctcttcacccccaggttcctgctaagatcccacgggcgagggcttgctctggactcagtctgtcaagtccccgaagcttcctgcagctccaccttgtaaaaatgctgcctttgggaatcttcgaaatatgtacacagagaaaatcacatgaaggagacctggggtccccacttgtgagtgcaactgcaagtaactctggctagagagacacatgtgtcttgtgtcaaggcaggaggataacctggatgaccttctgaggtctcttcagcccttttcgctagtggtcacccaccaccatggttacttgccagcaacatctctattgctggatggtccctgtctataaccttgggctagtatattttttccaatatgggaccttagtcttactactgatgagttctatgggtctcttgctagggggtaaggatttttattcttgggcttatagagccagttagatcataattcttatgaaatagagagtgtcctaaatatcactgaaataaaaagtaggaaaaagaagcttgaattttaagactgaggctgctctgcagattctagtttggctttcagagttcaagagtggtggcatcttcacctgaattcttcaatgccagggtaataaaccaaaatagtcctaatcagtatatgctagttgagcatcggcataattttctttcctctggctgatcccagccctaaaggaagggtagacccgtgtctttccagccctaaaggaagggtagacccgtgtctttccagccctaaaggaagggcagacccgtgtctttccatgcccgagggccacgacgtcactatgcagggcacacgtggcttggtttaaaaaggtcatcttagatttatcttagtaaatgtaataaattattttttagatcttgaaatttataataaaaatactttacctaccctgatcaccaaaacctgatgttttaaatgtgctttctttttgaaatttatgttttcaaataaaatctccctaaagcaatatttaaaaattggtcaaaac

SEQ ID NO: 4624 - protein, 205 aa, Homosapiens; identical to SEQ ID NO: 4622

SEQ ID NO: 4625 - DNA, 4060 bp, Homosapiens
ttctccctgagtcatccttgctccctccctcctcattctcttttcatttcctgggcttgtgttgctacgttagaagtctgtctgtctcctggaaagggcagagcaagtccactgtgggcactgtgtttagtcttgagtcagaggaggaggaataccctggaatcactgcagaagatagcaatgacatttacatcctgcccagcgacaactctggacaagtcagtcccccagagtctccaactgtgaccacttcctggcagtctgagagcttacctgtgtcactgtcagctagccagagttggcacacagaaagcctgccagtgtcactaggccctgagtcctggcagcagattgcaatggatcctgaagaagtgaaaagcttagacagcaacggagctggagagaagagtgagaacaactcctctaattctgacattgtgcacgtggagaaagaagaggtgcccgagggcatggaagaggctgctgtggcttctgtggtcttgccagcgcgggagctgcaagaggcacttcctgaagccccagctcccttgcttccacatatcactgccacctccctgctggggacaagggaacctgacacagaagtgatcacagttgagaaatccagccctgctacatctctgtttgtagaacttgatgaagaagaggtgaaagcagcaacaactgaacctactgaagtggaggaggtggtccccgcactggaacccacagaaacgctgctgagtgagaaggagataaacgcaagggaagagagccttgtggaagagctgtcccctgccagcgagaagaagcccgtgccgccgtctgagggcaagtctagactgtcccccgccggtgagatgaagcccatgccgctgtctgagggcaagtctatactgctgtttggaggggctgctgctgttgccatcctggcagtggccatcggggtagccctggctctgagaaagaaataggaggcttttcagaagagaaagacagaaggatgtaaggttggagttgtattggctggaatttgaacctccagcagctgtctggacatttgtggaacactctgggataattggggacttctgctcaacatggcagtggcatgttaggcatgttagggcttgaggtggggcattcacattcatctgactgtaaatcccaagggcctccgctcatgctaaattgagaatcttaggggtaaagcaccccctccaggaccgggtttctcagccttggcactagtgctgttctgaccattctctgtgttggggctgtcctgtgtgtggtgggctccacccactagatgccagtggcaccccctcccagagatgacaaacgaaaatgtctctagacattgccaaatgtcccgtgtgaacatcccctattgagacccactgctttagcgagagagggtttacttaggaagaattgggatagaaattcccagctgagagaacttagctgtgggctcctcagctactgacttcttagctcttaatccccttagaatttcatctttctcgatgagcaggctctgcacccactctttttttgccccccgccctcatcctggagtgtgagggtgctcgcccgtactctcagctgcctctcagggactgcactgttcctcttcacccccaggttcctgctaagatcccacgggcgagggcttgctctggactcagtctgtcaagtccccgaagcttcctgcagctccaccttgtaaaaatgctgcctttgggaatcttcgaaatatgtacacagagaaaatcacatgaaggagacctggggtccccacttgtgagtgcaactgcaagtaactctggctagagagacacatgtgtcttgtgtcaaggcaggaggataacctggatgaccttctgaggtctcttcagcccttttcgctagtggtcacccaccaccatggttacttgccagcaacatctctattgctggatggtccctgtctataaccttgggctagtatattttttccaatatgggaccttagtcttactactgatgagttctatgggtctcttgctagggggtaaggatttttattcttgggcttatagagccagttagatcataattcttatgaaatagagagtgtcctaaatatcactgaaataaaaagtaggaaaaagaagcttgaattttaagactgaggctgctctgcagattctagtttggctttcagagttcaagagtggtggcatcttcacctgaattcttcaatgccagggtaataaaccaaaatagtcctaatcagtatatgctagttgagcatcggcataattttctttcctctggctgatcccagccctaaaggaagggtagacccgtgtctttccagccctaaaggaagggtagacccgtgtctttccagccctaaaggaagggcagacccgtgtctttccatgcccgagggccacgacgtcactatgcagggcacacgtggcttggtttaaaaaggtcatcttagatttatcttagtaaatgtaataaattattttttagatcttgaaatttataataaaaatactttacctaccctgatcaccaaaacctgatgttttaaatgtgctttctttttgaaatttatgttttcaaataaaatctccctaaagcaatatttaaaaattggtcaaaacaaggtctgggagtatgtttgtgtgtctttccagctttatcctgtagcgtgtctttgttctgtgttttagtgtcccatttagggagtgatgttttaagggtttttgtgtacttggattaagtaattagaggtgagtggggggaatgggattattgaggcaatgatttttttcttcatgggctctgatagttgcattgattgttctgtattctaattgctatatttgtgtttgcataggtgaagagcaaactggtgcgttatcttgatttttaaaaagtaataaatcctatgagttccagtattaacacttgccagttctggatcctcacacccattggctgagcgcattcaagcaccaatcgaagccaggttcatctctgagctgctgaaaggaggtgtgaggcttaggaaattggagcctgtgttgcccacgaaaggaaagaataaggaagaaatgtggtatggaagcggctacttgctgctttattttcccacctgttagacattcctccacagtgatttggccagttgtatttcacggtaatggaactagatagtgttttccattggctttctctggtagctcttggtcagctcctgagttaacaggatgtggcagcatccctgttcttccttcacgtcctcaccctctgcctccagcagtggaagggaacagccctcatgaggactgcttcctactgcagctcctgctttttgctcatacatttaaaaaactatttctcaagcttcccctccttttggggggaggagctgatagtaggaggccattccttccacctccaacttataccctctaagtctaaggtgaaggaaagattcagaataaatccaacttgtttatagaaaagttcttgttagtccttagacctcatctcaactgctctgttgaaggtaatgatttattggggggaaaaaacaacgccaatttatcctctctgtattaaagtgataattctgggcccacagaaatcagtcagtacctgcggtgtgccttaaggggactctcatgatcatcattcccttctagagaacattctagatgaagaaatgcaactgttgaccttctggttcacccatctccccctcgaggcattcttgataccccttctcacctgcatttctgtcccagggataccagatgcagccactacctaactaggcttgtcctgggggagtgagccgtgaacctggagacatggctttgacccacagctactgttcatttcctcaggctttgcgctgattccctcaataatatgacagtaaggcaagtagtctccttgcctttctcctgaaaggtatgagatgtggacatttcagtgtttgaattattttaagagatgttttatagaaataaaacgttttgtagctaag

SEQ ID NO: 4626 - protein, 205 aa, Homosapiens; identical to SEQ ID NO: 4622

SEQ ID NO: 4627 - DNA, 4351 bp, Homosapiens
ttctccctgagtcatccttgctccctccctcctcattctcttttcatttcctgggcttgtgttgctacgttagaagtctgtctgtctcctggaaagggcagagcaagtccactgtgggcactgtgtttagtcttgagtcagaggaggaggaataccctggaatcactgcagaagatagcaatgacatttacatcctgcccagcgacaactctggacaagtcagtcccccagagtctccaactgtgaccacttcctggcagtctgagagcttacctgtgtcactgtcagctagccagagttggcacacagaaagcctgccagtgtcactaggccctgagtcctggcagcagattgcaatggatcctgaagaagtgaaaagcttagacagcaacggagctggagagaagagtgagaacaactcctctaattctgacattgtgcacgtggagaaagaagaggtgcccgagggcatggaagaggctgctgtggcttctgtggtcttgccagcgcgggagctgcaagaggcacttcctgaagccccagctcccttgcttccacatatcactgccacctccctgctggggacaagggaacctgacacagaagtgatcacagttgagaaatccagccctgctacatctctgtttgtagaacttgatgaagaagaggtgaaagcagcaacaactgaacctactgaagtggaggaggtggtccccgcactggaacccacagaaacgctgctgagtgagaaggagataaacgcaagggaagagagccttgtggaagagctgtcccctgccagcgagaagaagcccgtgccgccgtctgagggcaagtctagactgtcccccgccggtgagatgaagcccatgccgctgtctgagggcaagtctatactgctgtttggaggggctgctgctgttgccatcctggcagtggccatcggggtagccctggctctgagaaagaaataggaggcttttcagaagagaaagacagaaggatgtaaggttggagttgtattggctggaatttgaacctccagcagctgtctggacatttgtggaacactctgggataattggggacttctgctcaacatggcagtggcatgttaggcatgttagggcttgaggtggggcattcacattcatctgactgtaaatcccaagggcctccgctcatgctaaattgagaatcttaggggtaaagcaccccctccaggaccgggtttctcagccttggcactagtgctgttctgaccattctctgtgttggggctgtcctgtgtgtggtgggctccacccactagatgccagtggcaccccctcccagagatgacaaacgaaaatgtctctagacattgccaaatgtcccgtgtgaacatcccctattgagacccactgctttagcgagagagggtttacttaggaagaattgggatagaaattcccagctgagagaacttagctgtgggctcctcagctactgacttcttagctcttaatccccttagaatttcatctttctcgatgagcaggctctgcacccactctttttttgccccccgccctcatcctggagtgtgagggtgctcgcccgtactctcagctgcctctcagggactgcactgttcctcttcacccccaggttcctgctaagatcccacgggcgagggcttgctctggactcagtctgtcaagtccccgaagcttcctgcagctccaccttgtaaaaatgctgcctttgggaatcttcgaaatatgtacacagagaaaatcacatgaaggagacctggggtccccacttgtgagtgcaactgcaagtaactctggctagagagacacatgtgtcttgtgtcaaggcaggaggataacctggatgaccttctgaggtctcttcagcccttttcgctagtggtcacccaccaccatggttacttgccagcaacatctctattgctggatggtccctgtctataaccttgggctagtatattttttccaatatgggaccttagtcttactactgatgagttctatgggtctcttgctagggggtaaggatttttattcttgggcttatagagccagttagatcataattcttatgaaatagagagtgtcctaaatatcactgaaataaaaagtaggaaaaagaagcttgaattttaagactgaggctgctctgcagattctagtttggctttcagagttcaagagtggtggcatcttcacctgaattcttcaatgccagggtaataaaccaaaatagtcctaatcagtatatgctagttgagcatcggcataattttctttcctctggctgatcccagccctaaaggaagggtagacccgtgtctttccagccctaaaggaagggtagacccgtgtctttccagccctaaaggaagggcagacccgtgtctttccatgcccgagggccacgacgtcactatgcagggcacacgtggcttggtttaaaaaggtcatcttagatttatcttagtaaatgtaataaattattttttagatcttgaaatttataataaaaatactttacctaccctgatcaccaaaacctgatgttttaaatgtgctttctttttgaaatttatgttttcaaataaaatctccctaaagcaatatttaaaaattggtcaaaacaaggtctgggagtatgtttgtgtgtctttccagctttatcctgtagcgtgtctttgttctgtgttttagtgtcccatttagggagtgatgttttaagggtttttgtgtacttggattaagtaattagaggtgagtggggggaatgggattattgaggcaatgatttttttcttcatgggctctgatagttgcattgattgttctgtattctaattgctatatttgtgtttgcataggtgaagagcaaactggtgcgttatcttgatttttaaaaagtaataaatcctatgagttccagtattaacacttgccagttctggatcctcacacccattggctgagcgcattcaagcaccaatcgaagccaggttcatctctgagctgctgaaaggaggtgtgaggcttaggaaattggagcctgtgttgcccacgaaaggaaagaataaggaagaaatgtggtatggaagcggctacttgctgctttattttcccacctgttagacattcctccacagtgatttggccagttgtatttcacggtaatggaactagatagtgttttccattggctttctctggtagctcttggtcagctcctgagttaacaggatgtggcagcatccctgttcttccttcacgtcctcaccctctgcctccagcagtggaagggaacagccctcatgaggactgcttcctactgcagctcctgctttttgctcatacatttaaaaaactatttctcaagcttcccctccttttggggggaggagctgatagtaggaggccattccttccacctccaacttataccctctaagtctaaggtgaaggaaagattcagaataaatccaacttgtttatagaaaagttcttgttagtccttagacctcatctcaactgctctgttgaaggtaatgatttattggggggaaaaaacaacgccaatttatcctctctgtattaaagtgataattctgggcccacagaaatcagtcagtacctgcggtgtgccttaaggggactctcatgatcatcattcccttctagagaacattctagatgaagaaatgcaactgttgaccttctggttcacccatctccccctcgaggcattcttgataccccttctcacctgcatttctgtcccagggataccagatgcagccactacctaactaggcttgtcctgggggagtgagccgtgaacctggagacatggctttgacccacagctactgttcatttcctcaggctttgcgctgattccctcaataatatgacagtaaggcaagtagtctccttgcctttctcctgaaaggtatgagatgtggacatttcagtgtttgaattattttaagagatgttttatagaaataaaacgttttgtagctaagaattttccctttctcttaatttcttacatctttccacacaaacttatctttccaagaatttgaggtggtgatcatacccatcaagacggccttgtaggctatctgattgctaacagacacgacctagagcttctgcccaaattcccacacaagcattatctcgtttaacatctcagcgacatactggataccagaataatgtttcctcttctctggtgcaccaaaacctgcccttagtgataatctctcaattatgacattcatttgagtttagggtgtataatttttcct

SEQ ID NO: 4628 - protein, 205 aa, Homosapiens; identical to SEQ ID NO: 4622

SEQ ID NO: 4629 - DNA, 1948 bp, Homosapiens
caccacacccagctaatttttgtatttttagtagagatggggtttcaccatgttggccaggatggtctccatctcttgacctctggctcatgcttgtaatcccaacagtttgggaggccgaggcgggcgaatcacttgaggtcaggagttcgagaccagcctggccaacaccatggtgataccctatttctaccaaaagtattttaaaaaaattagccaggttgctgggattacaggcgtcagccactgcacccagcctatattaatgtaactatacataacattatattaatataataaaatatgtattgaatcctgtgaggcacatgggaagagtctggctgagaaaagtgaaaccagtgcaacaaaaatataaaaatatatccttagtctccaggagcttagagttataaggcagatccacactatttcctgtatgttttatagcaaggagtaacagataaatcctatgagtttagaagtaacaagaaggattcagatgggcagaattgggagagcattctggactttctggattgatgggacagtgtgacttcagtcattctgtttgggggttggaattgtttttagcaccagtgctgtgtgaccttggacaacaaagacacaggtacagttcagaggtatggaaatacagagatgaataaagagctgtacctaacagtacttgatgtttagagcttttatatcaaagatgggaccaactttctcatcatccaagcatttattgagcattactgtttgctcagcatatgttaggcattacctgggggataacaaagaagtttaaagcatgttttctcccttgaagcatttataatgtcattgagaagatgactaatacatgtgaaaaaattagtgagaagtatggtacaaaatagatattttgatagtttgtgtggtccagactcagtgccgtctaggagttcaggaggaataagagaggaagattaagtacagtggaacttaagccagaccctgctggagccggatcagggtcttaaactggggtccatagatgtgcttcagggagtctaaaattccctctaaaatggtatgctgctttgtgtgaaagcacagttttaaggcagagaggtcttaatacctttcatcatatttgcaaaaccttttctgctcccctaaaatgttaataccagtatctatgtgaataaggagacagcgcttgggaatttagtatggcatttgtagggcacaatgagtaacctgccaggagaagcctcccctcccataggaaacacctagcacacaattacagagagatttgggtgaaatgatggccctagcgatagagaagaaagattgactttacctcctctaatgcccttcactgtgctgtagcctttcaaaaatttatgtttggtttcctaggaaaacattaatgtgctcaagaagggataatgtatcattctaaatattgtatgagtttgccggcttgctttttaactgagtcagaaaattataaatagacttcaaatgtagaactactttattttgtaacattcaaactgagcctttatgtaatggccggatggtaccttagattcatcttttctcctctaagtaattgatggtgtgtaagaggtgccatattgtgggacagggtcttgaattcatgtctcagcaagactgagggggaaacatgcaccttttatgagatagaggctgatagaggcaatgttttatatcaagaaaggtactgatattttacttctcgttcattggcctaatctttcctcctccagctccagctttgcctttcttcaccccctgtcctatgctttggcatacagaagagccagtagtctgcatatatgatgatacttttcagcaccatgtttttgtttatgcttttccttctgcctggaatatcttgctcatctttgatctgctggttttctctttcattctt

SEQ ID NO: 4630 - protein, 32 aa, Homosapiens
MVIPYFYQKYFKKISQVAGITGVSHCTQPILM

SEQ ID NO: 4631 - DNA, 2262 bp, Homosapiens
gggcactgtgtttagtcttgagtcagaggaggaggaataccctggaatcactgcagaagatagcaatgacatttacatcctgcccagcgacaactctggacaagtcagtcccccagagtctccaactgtgaccacttcctggcagtctgagagcttacctgtgtcactgtcagctagccagagttggcacacagaaagcctgccagtgtcactaggccctgagtcctggcagcagattgcaatggatcctgaagaagtgaaaagcttagacagcaacggagctggagagaagagtgagaacaactcctctaattctgacattgtgcacgtggagaaagaagaggtgcccgagggccacgacgtcactatgcagggcacacgtggcttggtttaaaaaggtcatcttagatttatcttagtaaatgtaataaattattttttagatcttgaaatttataataaaaatactttacctaccctgatcaccaaaacctgatgttttaaatgtgctttctttttgaaatttatgttttcaaataaaatctccctaaagcaatatttaaaaattggtcaaaacaaggtctgggagtatgtttgtgtgtctttccagctttatcctgtagcgtgtctttgttctgtgttttagtgtcccatttagggagtgatgttttaagggtttttgtgtacttggattaagtaattagaggtgagtggggggaatgggattattgaggcaatgatttttttcttcatgggctctgatagttgcattgattgttctgtattctaattgctatatttgtgtttgcataggtgaagagcaaactggtgcgttatcttgatttttaaaaagtaataaatcctatgagttccagtattaacacttgccagttctggatcctcacacccattggctgagcgcattcaagcaccaatcgaagccaggttcatctctgagctgctgaaaggaggtgtgaggcttaggaaattggagcctgtgttgcccacgaaaggaaagaataaggaagaaatgtggtatggaagcggctacttgctgctttattttcccacctgttagacattcctccacagtgatttggccagttgtatttcacggtaatggaactagatagtgttttccattggctttctctggtagctcttggtcagctcctgagttaacaggatgtggcagcatccctgttcttccttcacgtcctcaccctctgcctccagcagtggaagggaacagccctcatgaggactgcttcctactgcagctcctgctttttgctcatacatttaaaaaactatttctcaagcttcccctccttttggggggaggagctgatagtaggaggccattccttccacctccaacttataccctctaagtctaaggtgaaggaaagattcagaataaatccaacttgtttatagaaaagttcttgttagtccttagacctcatctcaactgctctgttgaaggtaatgatttattggggggaaaaaacaacgccaatttatcctctctgtattaaagtgataattctgggcccacagaaatcagtcagtacctgcggtgtgccttaaggggactctcatgatcatcattcccttctagagaacattctagatgaagaaatgcaactgttgaccttctggttcacccatctccccctcgaggcattcttgataccccttctcacctgcatttctgtcccagggataccagatgcagccactacctaactaggcttgtcctgggggagtgagccgtgaacctggagacatggctttgacccacagctactgttcatttcctcaggctttgcgctgattccctcaataatatgacagtaaggcaagtagtctccttgcctttctcctgaaaggtatgagatgtggacatttcagtgtttgaattattttaagagatgttttatagaaataaaacgttttgtagctaagaattttccctttctcttaatttcttacatctttccacacaaacttatctttccaagaatttgaggtggtgatcatacccatcaagacggccttgtaggctatctgattgctaacagacacgacctagagcttctgcccaaattcccacacaagcattatctcgtttaacatctcagcgacatactggataccagaataatgtttcctcttctctggtgcaccaaaacctgcccttagtgataatctctcaattatgacattcatttgagtttagggtgtataatttttcct

SEQ ID NO: 4632 - protein, 50 aa, Homosapiens
MDPEEVKSLDSNGAGEKSENNSSNSDIVHVEKEEVPEGHDVTMQGTRGLV

SEQ ID NO: 4633 - DNA, 1344 bp, Homosapiens
ttccagtgtagacggagccctggcatgtcaacagcgttcctagagaagacaggctggaagatagctgtgacttctattttaaagacaatgttaaacttataacccactttaaaatatctacattaatatacttgaatgaaaatgtccatttacacgtatttgaatggccttcatatcatccacacatgaatctgcacatctgtaaatctacacacggtgcctttatttccactgtgcaggttcccacttaaaaattaaattggaaagcaggtttcaaggaagtagaaacaaaatacaatttttttggtaaaaaaaaattactgtttattaaagtacaaccatagaggatggtcttacagcaggcagtatcctgtttgaggaaagcaagaatcagagaaggaacataccccttacaaatgaaaaattccactcaaaatagggactatctatcttaatactaaggaaccaacaatcttcctgtttaaaaaaccacatggcacagagattctgaactaaagtgctgcactcaaatgatgggaagtccggccccagtacacaggggcttgactttttcaacttcgtttcctttgttggagtcaaaaagaaccacttgtggttctaaaaggtgtgaaggtgatttaagggcccaggtcagccactgtttgtttacaaaatcaggtaactaactgcatacactttttctctttccatgacatcaagactttgctaaagacatgaagccacgggtgccagaagctactgcgatgccccgggagttagccccctggtaatagctgtaaacttccaatttctagccatacgctcagctcatccatgcctcagaagtgcatctggagagaacaggtttctaagcataaaagatgaaagagcagttggactttttaaaaattcagcaaagtggttccctctcttagggacagtcaaaaccaagtcacttaggtagtaccaaaataaataaggaaaagcttagctttagaaacagtgcaacactggtctgctgttccagtggtaagctatgtcccaggaatcaagtttaaaatcatcagaaaggaaaaacaaactctatattgttcagcatgcaatacataccacgctagggctggctcaattgaaagtgggcaaaagcttacaaatactaaaaagaagtgctgccgcgcagtgtggaggccactgtttggaaataaatcttcctaacactacgacttttcatgttttggagtggacttttaaaaaagttttccaaccacaatggaaacaggttgaaccacactgcgcctacacatccatccatacgtcagccattataatcagattctcactggg

SEQ ID NO: 4634 - protein, 101 aa, Homosapiens
MSQESSLKSSERKNKLYIVQHAIHTTLGLAQLKVGKSLQILKRSAAAQCGGHCLEINLPNTTTFHVLEWTFKKVFQPQWKQVEPHCAYTSIHTSAIIIRFS

SEQ ID NO: 4635 - DNA, 1641 bp, Homosapiens
atgctggtgctggccctgctgctggccaagaaggtggccagtcacacgccgtccttgctccgtgatgtctttcacacaacagtgaattttattaaccagaacctacgcacctacgtgaggagcttagccagaaatgggatggactgaacggacagttccagaagtgtgactggctaaagctcgatgtggtcacagctgtatagctgcttccagtgtagacggagccctggcatgtcaacagcgttcctagagaagacaggctggaagatagctgtgacttctattttaaagacaatgttaaacttataacccactttaaaatatctacattaatatacttgaatgaaaatgtccatttacacgtatttgaatggccttcatatcatccacacatgaatctgcacatctgtaaatctacacacggtgcctttatttccactgtgcaggttcccacttaaaaattaaattggaaagcaggtttcaaggaagtagaaacaaaatacaatttttttggtaaaaaaaaattactgtttattaaagtacaaccatagaggatggtcttacagcaggcagtatcctgtttgaggaaagcaagaatcagagaaggaacataccccttacaaatgaaaaattccactcaaaatagggactatctatcttaatactaaggaaccaacaatcttcctgtttaaaaaaccacatggcacagagattctgaactaaagtgctgcactcaaatgatgggaagtccggccccagtacacaggggcttgactttttcaacttcgtttcctttgttggagtcaaaaagaaccacttgtggttctaaaaggtgtgaaggtgatttaagggcccaggtcagccactgtttgtttacaaaatcaggtaactaactgcatacactttttctctttccatgacatcaagactttgctaaagacatgaagccacgggtgccagaagctactgcgatgccccgggagttagccccctggtaatagctgtaaacttccaatttctagccatacgctcagctcatccatgcctcagaagtgcatctggagagaacaggtttctaagcataaaagatgaaagagcagttggactttttaaaaattcagcaaagtggttccctctcttagggacagtcaaaaccaagtcacttaggtagtaccaaaataaataaggaaaagcttagctttagaaacagtgcaacactggtctgctgttccagtggtaagctatgtcccaggaatcagtttaaaagcacgacagtggatgctgggtccatatcacacacattgctgtgaacaggaaactcctgtgaccacaacatgaggccactggagacgcatatgagtaagggcactgacggactcatgatttcttcttaccagatgctttcctgttctttaagagtttaaaatcatcagaaaggaaaaacaaactctatattgttcagcatgcaatacataccacgctagggctggctcaattgaaagtgggcaaaagcttacaaatactaaaaagaagtgctgccgcgcagtgtggaggccactgtttggaaataaatcttcctaacactacgacttttcatgttttggagtggacttttaaaaaagttttccaaccacaatggaa

SEQ ID NO: 4636 - protein, 48 aa, Homosapiens [sequence omitted]

SEQ ID NO: 4637 - DNA, 2514 bp, Homosapiens
acccttgccggcggatcggaatccccgcccacaccgtggtctttccagcaccgcagacacctgccggctcctcccgagcggagctcagggctgacaaagcgcggtcagagcggccgcttactggggctcgcccgctccttagagcactggcaatgatgtgcggatcctcgctgctgctgctgggaaactgttgagtggctgaatgaccccaggggaccctgggagagctctgaagccctcagccaccaagtggctgggctggcaagggttcattcattcattcaacaaatacgaatgtgcagcggtgctggggtcatgatggctcggtgggcagcgaggggccgggccggctggaggagcacagtgcggattctgtcgccactgggacactgtgaaccaggagtgagtcggagctgccgcgctgcccaggccatggactgtgaggtcaacaacggttccagcctcagggatgagtgcatcacaaacctactggtgtttggcttcctccaaagctgttctgacaacagcttccgcagagagctggacgcactgggccacgagctgccagtgctggctccccagtgggagggctacgatgagctgcagactgatggcaaccgcagcagccactcccgcttgggaagaatagaggcagattctgaaagtcaagaagacatcatccggaatattgccaggcacctcgcccaggtcggggacagcatggaccgtagcatccctccgggcctggtgaacggcctggccctgcagctcaggaacaccagccggtcggaggaggaccggaacagggacctggccactgccctggagcagctgctgcaggcctaccctagagacatggagaaggagaagaccatgctggtgctggccctgctgctggccaagaaggtggccagtcacacgccgtccttgctccgtgatgtctttcacacaacagtgaattttattaaccagaacctacgcacctacgtgaggagcttagccagaaatgggatggactgaacggacagttccagaagtgtgactggctaaagctcgatgtggtcacagctgtatagctgcttccagtgtagacggagccctggcatgtcaacagcgttcctagagaagacaggctggaagatagctgtgacttctattttaaagacaatgttaaacttataacccactttaaaatatctacattaatatacttgaatgaaaatgtccatttacacgtatttgaatggccttcatatcatccacacatgaatctgcacatctgtaaatctacacacggtgcctttatttccactgtgcaggttcccacttaaaaattaaattggaaagcaggtttcaaggaagtagaaacaaaatacaatttttttggtaaaaaaaaattactgtttattaaagtacaaccatagaggatggtcttacagcaggcagtatcctgtttgaggaaagcaagaatcagagaaggaacataccccttacaaatgaaaaattccactcaaaatagggactatctatcttaatactaaggaaccaacaatcttcctgtttaaaaaaccacatggcacagagattctgaactaaagtgctgcactcaaatgatgggaagtccggccccagtacacaggggcttgactttttcaacttcgtttcctttgttggagtcaaaaagaaccacttgtggttctaaaaggtgtgaaggtgatttaagggcccaggtcagccactgtttgtttacaaaatcaggtaactaactgcatacactttttctctttccatgacatcaagactttgctaaagacatgaagccacgggtgccagaagctactgcgatgccccgggagttagccccctggtaatagctgtaaacttccaatttctagccatacgctcagctcatccatgcctcagaagtgcatctggagagaacaggtttctaagcataaaagatgaaagagcagttggactttttaaaaattcagcaaagtggttccctctcttagggacagtcaaaaccaagtcacttaggtagtaccaaaataaataaggaaaagcttagctttagaaacagtgcaacactggtctgctgttccagtggtaagctatgtcccaggaatcagtttaaaagcacgacagtggatgctgggtccatatcacacacattgctgtgaacaggaaactcctgtgaccacaacatgaggccactggagacgcatatgagtaagggcactgacggactcatgatttcttcttaccagatgctttcctgttctttaagagtttaaaatcatcagaaaggaaaaacaaactctatattgttcagcatgcaatacataccacgctagggctggctcaattgaaagtgggcaaaagcttacaaatactaaaaagaagtgctgccgcgcagtgtggaggccactgtttggaaataaatcttcctaacactacgacttttcatgttttggagtggacttttaaaaaagttttccaaccacaatggaa

SEQ ID NO: 4638 - protein, 241 aa, Homosapiens; identical to SEQ ID NO: 660

SEQ ID NO: 4639 - DNA, 2019 bp, Homosapiens
ggaggaagcgggtagtcgaccgtgtccgcgcgcctgggagacgctgcctcggcccggacgcgcccgcgcccccgcggctggagggtggtcgccactgggacactgtgaaccaggagtgagtcggagctgccgcgctgcccaggccatggactgtgaggtcaacaacggttccagcctcagggatgagtgcatcacaaacctactggtgtttggcttcctccaaagctgttctgacaacagcttccgcagagagtgaacggcctggccctgcagctcaggaacaccagccggtcggaggaggaccggaacagggacctggccactgccctggagcagctgctgcaggcctaccctagagacatggagaaggagaagaccatgctggtgctggccctgctgctggccaagaaggtggccagtcacacgccgtccttgctccgtgatgtctttcacacaacagtgaattttattaaccagaacctacgcacctacgtgaggagcttagccagaaatgggatggactgaacggacagttccagaagtgtgactggctaaagctcgatgtggtcacagctgtatagctgcttccagtgtagacggagccctggcatgtcaacagcgttcctagagaagacaggctggaagatagctgtgacttctattttaaagacaatgttaaacttataacccactttaaaatatctacattaatatacttgaatgaaaatgtccatttacacgtatttgaatggccttcatatcatccacacatgaatctgcacatctgtaaatctacacacggtgcctttatttccactgtgcaggttcccacttaaaaattaaattggaaagcaggtttcaaggaagtagaaacaaaatacaatttttttggtaaaaaaaaattactgtttattaaagtacaaccatagaggatggtcttacagcaggcagtatcctgtttgaggaaagcaagaatcagagaaggaacataccccttacaaatgaaaaattccactcaaaatagggactatctatcttaatactaaggaaccaacaatcttcctgtttaaaaaaccacatggcacagagattctgaactaaagtgctgcactcaaatgatgggaagtccggccccagtacacaggggcttgactttttcaacttcgtttcctttgttggagtcaaaaagaaccacttgtggttctaaaaggtgtgaaggtgatttaagggcccaggtcagccactgtttgtttacaaaatcaggtaactaactgcatacactttttctctttccatgacatcaagactttgctaaagacatgaagccacgggtgccagaagctactgcgatgccccgggagttagccccctggtaatagctgtaaacttccaatttctagccatacgctcagctcatccatgcctcagaagtgcatctggagagaacaggtttctaagcataaaagatgaaagagcagttggactttttaaaaattcagcaaagtggttccctctcttagggacagtcaaaaccaagtcacttaggtagtaccaaaataaataaggaaaagcttagctttagaaacagtgcaacactggtctgctgttccagtggtaagctatgtcccaggaatcagtttaaaagcacgacagtggatgctgggtccatatcacacacattgctgtgaacaggaaactcctgtgaccacaacatgaggccactggagacgcatatgagtaagggcactgacggactcatgatttcttcttaccagatgctttcctgttctttaagagtttaaaatcatcagaaaggaaaaacaaactctatattgttcagcatgcaatacataccacgctagggctggctcaattgaaagtgggcaaaagcttacaaatactaaaaagaagtgctgccgcgcagtgtggaggccactgtttggaaataaatcttcctaacactacgacttttcatgttttggagtggacttttaaaaaagttttccaaccacaatggaa

SEQ ID NO: 4640 - protein, 57 aa, Homosapiens
MSASQTYWCLASSKAVLTTASAESERPGPAAQEHQPVGGGPEQGPGHCPGAAAAGLP

SEQ ID NO: 4641 - DNA, 1965 bp, Homosapiens
agcgcgcggggcgccataaggaggaagcgggtagtcgaccgtgtccgcgcgcctgggagacgctgcctcggcccggacgcgcccgcgcccccgcggctggagggtgattctgaaagtcaagaagacatcatccggaatattgccaggcacctcgcccaggtcggggacagcatggaccgtagcatccctccgggcctggtgaacggcctggccctgcagctcaggaacaccagccggtcggaggaggaccggaacagggacctggccactgccctggagcagctgctgcaggcctaccctagagacatggagaaggagaagaccatgctggtgctggccctgctgctggccaagaaggtggccagtcacacgccgtccttgctccgtgatgtctttcacacaacagtgaattttattaaccagaacctacgcacctacgtgaggagcttagccagaaatgggatggactgaacggacagttccagaagtgtgactggctaaagctcgatgtggtcacagctgtatagctgcttccagtgtagacggagccctggcatgtcaacagcgttcctagagaagacaggctggaagatagctgtgacttctattttaaagacaatgttaaacttataacccactttaaaatatctacattaatatacttgaatgaaaatgtccatttacacgtatttgaatggccttcatatcatccacacatgaatctgcacatctgtaaatctacacacggtgcctttatttccactgtgcaggttcccacttaaaaattaaattggaaagcaggtttcaaggaagtagaaacaaaatacaatttttttggtaaaaaaaaattactgtttattaaagtacaaccatagaggatggtcttacagcaggcagtatcctgtttgaggaaagcaagaatcagagaaggaacataccccttacaaatgaaaaattccactcaaaatagggactatctatcttaatactaaggaaccaacaatcttcctgtttaaaaaaccacatggcacagagattctgaactaaagtgctgcactcaaatgatgggaagtccggccccagtacacaggggcttgactttttcaacttcgtttcctttgttggagtcaaaaagaaccacttgtggttctaaaaggtgtgaaggtgatttaagggcccaggtcagccactgtttgtttacaaaatcaggtaactaactgcatacactttttctctttccatgacatcaagactttgctaaagacatgaagccacgggtgccagaagctactgcgatgccccgggagttagccccctggtaatagctgtaaacttccaatttctagccatacgctcagctcatccatgcctcagaagtgcatctggagagaacaggtttctaagcataaaagatgaaagagcagttggactttttaaaaattcagcaaagtggttccctctcttagggacagtcaaaaccaagtcacttaggtagtaccaaaataaataaggaaaagcttagctttagaaacagtgcaacactggtctgctgttccagtggtaagctatgtcccaggaatcagtttaaaagcacgacagtggatgctgggtccatatcacacacattgctgtgaacaggaaactcctgtgaccacaacatgaggccactggagacgcatatgagtaagggcactgacggactcatgatttcttcttaccagatgctttcctgttctttaagagtttaaaatcatcagaaaggaaaaacaaactctatattgttcagcatgcaatacataccacgctagggctggctcaattgaaagtgggcaaaagcttacaaatactaaaaagaagtgctgccgcgcagtgtggaggccactgtttggaaataaatcttcctaacactacgacttttcatgttttggagtggacttttaaaaaagttttccaaccacaatggaa

SEQ ID NO: 4642 - protein, 99 aa, Homosapiens; identical to SEQ ID NO: 662

SEQ ID NO: 4643 - DNA, 2185 bp, Homosapiens
gaaggaggaagcgcgcggggcgccataaggaggaagcgggtagtcgaccgtgtccgcgcgcctgggagacgctgcctcggcccggacgcgcccgcgcccccgcggctggagggtggtcaacaacggttccagcctcagggatgagtgcatcacaaacctactggtgtttggcttcctccaaagctgttctgacaacagcttccgcagagagctggacgcactgggccacgagctgccagtgctggctccccagtgggagggctacgatgagctgcagactgatggcaaccgcagcagccactcccgcttgggaagaatagaggcagattctgaaagtcaagaagacatcatccggaatattgccaggcacctcgcccaggtcggggacagcatggaccgtagcatccctccgggcctggtgaacggcctggccctgcagctcaggaacaccagccggtcggaggaggaccggaacagggacctggccactgccctggagcagctgctgcaggcctaccctagagacatggagaaggagaagaccatgctggtgctggccctgctgctggccaagaaggtggccagtcacacgccgtccttgctccgtgatgtctttcacacaacagtgaattttattaaccagaacctacgcacctacgtgaggagcttagccagaaatgggatggactgaacggacagttccagaagtgtgactggctaaagctcgatgtggtcacagctgtatagctgcttccagtgtagacggagccctggcatgtcaacagcgttcctagagaagacaggctggaagatagctgtgacttctattttaaagacaatgttaaacttataacccactttaaaatatctacattaatatacttgaatgaaaatgtccatttacacgtatttgaatggccttcatatcatccacacatgaatctgcacatctgtaaatctacacacggtgcctttatttccactgtgcaggttcccacttaaaaattaaattggaaagcaggtttcaaggaagtagaaacaaaatacaatttttttggtaaaaaaaaattactgtttattaaagtacaaccatagaggatggtcttacagcaggcagtatcctgtttgaggaaagcaagaatcagagaaggaacataccccttacaaatgaaaaattccactcaaaatagggactatctatcttaatactaaggaaccaacaatcttcctgtttaaaaaaccacatggcacagagattctgaactaaagtgctgcactcaaatgatgggaagtccggccccagtacacaggggcttgactttttcaacttcgtttcctttgttggagtcaaaaagaaccacttgtggttctaaaaggtgtgaaggtgatttaagggcccaggtcagccactgtttgtttacaaaatcaggtaactaactgcatacactttttctctttccatgacatcaagactttgctaaagacatgaagccacgggtgccagaagctactgcgatgccccgggagttagccccctggtaatagctgtaaacttccaatttctagccatacgctcagctcatccatgcctcagaagtgcatctggagagaacaggtttctaagcataaaagatgaaagagcagttggactttttaaaaattcagcaaagtggttccctctcttagggacagtcaaaaccaagtcacttaggtagtaccaaaataaataaggaaaagcttagctttagaaacagtgcaacactggtctgctgttccagtggtaagctatgtcccaggaatcagtttaaaagcacgacagtggatgctgggtccatatcacacacattgctgtgaacaggaaactcctgtgaccacaacatgaggccactggagacgcatatgagtaagggcactgacggactcatgatttcttcttaccagatgctttcctgttctttaagagtttaaaatcatcagaaaggaaaaacaaactctatattgttcagcatgcaatacataccacgctagggctggctcaattgaaagtgggcaaaagcttacaaatactaaaaagaagtgctgccgcgcagtgtggaggccactgtttggaaataaatcttcctaacactacgacttttcatgttttggagtggacttttaaaaaagttttccaaccacaatggaa

SEQ ID NO: 4644 - protein, 99 aa, Homosapiens; identical to SEQ ID NO: 662

SEQ ID NO: 4645 - DNA, 2350 bp, Homosapiens
gaaggaggaagcgcgcggggcgccataaggaggaagcgggtagtcgaccgtgtccgcgcgcctgggagacgctgcctcggcccggacgcgcccgcgcccccgcggctggagggtggtcgccactgggacactgtgaaccaggagtgagtcggagctgccgcgctgcccaggccatggactgtgaggtcaacaacggttccagcctcagggatgagtgcatcacaaacctactggtgtttggcttcctccaaagctgttctgacaacagcttccgcagagagctggacgcactgggccacgagctgccagtgctggctccccagtgggagggctacgatgagctgcagactgatggcaaccgcagcagccactcccgcttgggaagaatagaggcaggggcgtcagacaataacacagcaagtgctgaggaagaaacggaggcggcagggagcgtggcagttgagcgtggccttcatggagctgcgacagtgattctgaaagtcaagaagacatcatccggaatattgccaggcacctcgcccaggtcggggacagcatggaccgtagcatccctccgggcctggtgaacggcctggccctgcagctcaggaacaccagccggtcggaggaggaccggaacagggacctggccactgccctggagcagctgctgcaggcctaccctagagacatggagaaggagaagaccatgctggtgctggccctgctgctggccaagaaggtggccagtcacacgccgtccttgctccgtgatgtctttcacacaacagtgaattttattaaccagaacctacgcacctacgtgaggagcttagccagaaatgggatggactgaacggacagttccagaagtgtgactggctaaagctcgatgtggtcacagctgtatagctgcttccagtgtagacggagccctggcatgtcaacagcgttcctagagaagacaggctggaagatagctgtgacttctattttaaagacaatgttaaacttataacccactttaaaatatctacattaatatacttgaatgaaaatgtccatttacacgtatttgaatggccttcatatcatccacacatgaatctgcacatctgtaaatctacacacggtgcctttatttccactgtgcaggttcccacttaaaaattaaattggaaagcaggtttcaaggaagtagaaacaaaatacaatttttttggtaaaaaaaaattactgtttattaaagtacaaccatagaggatggtcttacagcaggcagtatcctgtttgaggaaagcaagaatcagagaaggaacataccccttacaaatgaaaaattccactcaaaatagggactatctatcttaatactaaggaaccaacaatcttcctgtttaaaaaaccacatggcacagagattctgaactaaagtgctgcactcaaatgatgggaagtccggccccagtacacaggggcttgactttttcaacttcgtttcctttgttggagtcaaaaagaaccacttgtggttctaaaaggtgtgaaggtgatttaagggcccaggtcagccactgtttgtttacaaaatcaggtaactaactgcatacactttttctctttccatgacatcaagactttgctaaagacatgaagccacgggtgccagaagctactgcgatgccccgggagttagccccctggtaatagctgtaaacttccaatttctagccatacgctcagctcatccatgcctcagaagtgcatctggagagaacaggtttctaagcataaaagatgaaagagcagttggactttttaaaaattcagcaaagtggttccctctcttagggacagtcaaaaccaagtcacttaggtagtaccaaaataaataaggaaaagcttagctttagaaacagtgcaacactggtctgctgttccagtggtaagctatgtcccaggaatcagtttaaaagcacgacagtggatgctgggtccatatcacacacattgctgtgaacaggaaactcctgtgaccacaacatgaggccactggagacgcatatgagtaagggcactgacggactcatgatttcttcttaccagatgctttcctgttctttaagagtttaaaatcatcagaaaggaaaaacaaactctatattgttcagcatgcaatacataccacgctagggctggctcaattgaaagtgggcaaaagcttacaaatactaaaaagaagtgctgccgcgcagtgtggaggccactgtttggaaataaatcttcctaacactacgacttttcatgttttggagtggacttttaaaaaagttttccaaccacaatggaa

SEQ ID NO: 4646 - protein, 137 aa, Homosapiens
MDCEVNNGSSLRDECITNLLVFGFLQSCSDNSFRRELDALGHELPVLAPQWEGYDELQTDGNRSSHSRLGRIEAGASDNNTASAEEETEAAGSVAVERGLHGAATVILKVKKTSSGILPGTSPRSGTAWTVASLRAW

SEQ ID NO: 4647 - DNA, 2255 bp, Homosapiens
gaaggaggaagcgcgcggggcgccataaggaggaagcgggtagtcgaccgtgtccgcgcgcctgggagacgctgcctcggcccggacgcgcccgcgcccccgcggctggagggtggtcgccactgggacactgtgaaccaggagtgagtcggagctgccgcgctgcccaggccatggactgtgaggtcaacaacggttccagcctcagggatgagtgcatcacaaacctactggtgtttggcttcctccaaagctgttctgacaacagcttccgcagagagctggacgcactgggccacgagctgccagtgctggctccccagtgggagggctacgatgagctgcagactgatggcaaccgcagcagccactcccgcttgggaagaatagaggcagattctgaaagtcaagaagacatcatccggaatattgccaggcacctcgcccaggtcggggacagcatggaccgtagcatccctccgggcctggtgaacggcctggccctgcagctcaggaacaccagccggtcggaggaggaccggaacagggacctggccactgccctggagcagctgctgcaggcctaccctagagacatggagaaggagaagaccatgctggtgctggccctgctgctggccaagaaggtggccagtcacacgccgtccttgctccgtgatgtctttcacacaacagtgaattttattaaccagaacctacgcacctacgtgaggagcttagccagaaatgggatggactgaacggacagttccagaagtgtgactggctaaagctcgatgtggtcacagctgtatagctgcttccagtgtagacggagccctggcatgtcaacagcgttcctagagaagacaggctggaagatagctgtgacttctattttaaagacaatgttaaacttataacccactttaaaatatctacattaatatacttgaatgaaaatgtccatttacacgtatttgaatggccttcatatcatccacacatgaatctgcacatctgtaaatctacacacggtgcctttatttccactgtgcaggttcccacttaaaaattaaattggaaagcaggtttcaaggaagtagaaacaaaatacaatttttttggtaaaaaaaaattactgtttattaaagtacaaccatagaggatggtcttacagcaggcagtatcctgtttgaggaaagcaagaatcagagaaggaacataccccttacaaatgaaaaattccactcaaaatagggactatctatcttaatactaaggaaccaacaatcttcctgtttaaaaaaccacatggcacagagattctgaactaaagtgctgcactcaaatgatgggaagtccggccccagtacacaggggcttgactttttcaacttcgtttcctttgttggagtcaaaaagaaccacttgtggttctaaaaggtgtgaaggtgatttaagggcccaggtcagccactgtttgtttacaaaatcaggtaactaactgcatacactttttctctttccatgacatcaagactttgctaaagacatgaagccacgggtgccagaagctactgcgatgccccgggagttagccccctggtaatagctgtaaacttccaatttctagccatacgctcagctcatccatgcctcagaagtgcatctggagagaacaggtttctaagcataaaagatgaaagagcagttggactttttaaaaattcagcaaagtggttccctctcttagggacagtcaaaaccaagtcacttaggtagtaccaaaataaataaggaaaagcttagctttagaaacagtgcaacactggtctgctgttccagtggtaagctatgtcccaggaatcagtttaaaagcacgacagtggatgctgggtccatatcacacacattgctgtgaacaggaaactcctgtgaccacaacatgaggccactggagacgcatatgagtaagggcactgacggactcatgatttcttcttaccagatgctttcctgttctttaagagtttaaaatcatcagaaaggaaaaacaaactctatattgttcagcatgcaatacataccacgctagggctggctcaattgaaagtgggcaaaagcttacaaatactaaaaagaagtgctgccgcgcagtgtggaggccactgtttggaaataaatcttcctaacactacgacttttcatgttttggagtggacttttaaaaaagttttccaaccacaatggaa

SEQ ID NO: 4648 - protein, 195 aa, Homosapiens; identical to SEQ ID NO: 658

SEQ ID NO: 4649 - DNA, 1588 bp, Homosapiens
atgctggtgctggccctgctgctggccaagaaggtggccagtcacacgccgtccttgctccgtgatgtctttcacacaacagtgaattttattaaccagaacctacgcacctacgtgaggagcttagccagaaatgggatggactgaacggacagttccagaagtgtgactggctaaagctcgatgtggtcacagctgtatagctgcttccagtgtagacggagccctggcatgtcaacagcgttcctagagaagacaggctggaagatagctgtgacttctattttaaagacaatgttaaacttataacccactttaaaatatctacattaatatacttgaatgaaaatgtccatttacacgtatttgaatggccttcatatcatccacacatgaatctgcacatctgtaaatctacacacggtgcctttatttccactgtgcaggttcccacttaaaaattaaattggaaagcaggtttcaaggaagtagaaacaaaatacaatttttttggtaaaaaaaaattactgtttattaaagtacaaccatagaggatggtcttacagcaggcagtatcctgtttgaggaaagcaagaatcagagaaggaacataccccttacaaatgaaaaattccactcaaaatagggactatctatcttaatactaaggaaccaacaatcttcctgtttaaaaaaccacatggcacagagattctgaactaaagtgctgcactcaaatgatgggaagtccggccccagtacacaggggcttgactttttcaacttcgtttcctttgttggagtcaaaaagaaccacttgtggttctaaaaggtgtgaaggtgatttaagggcccaggtcagccactgtttgtttacaaaatcaggtaactaactgcatacactttttctctttccatgacatcaagactttgctaaagacatgaagccacgggtgccagaagctactgcgatgccccgggagttagccccctggtaatagctgtaaacttccaatttctagccatacgctcagctcatccatgcctcagaagtgcatctggagagaacaggtttctaagcataaaagatgaaagagcagttggactttttaaaaattcagcaaagtggttccctctcttagggacagtcaaaaccaagtcacttaggtagtaccaaaataaataaggaaaagcttagctttagaaacagtgcaacactggtctgctgttccagtggtaagctatgtcccaggaatcagtttaaaagcacgacagtggatgctgggtccatatcacacacattgctgtgaacaggaaactcctgtgaccacaacatgaggccactggagacgcatatgagtaagggcactgacggactcatgatttcttcttaccagatgctttcctgttctttaagagtttaaaatcatcagaaaggaaaaacaaactctatattgttcagcatgcaatacataccacgctagggctggctcaattgaaagtgggcaaaagcttacaaatactaaaaagaagtgctgccgcgcagtgtggaggccactgtttggaaataaatcttcctaacactacg

SEQ ID NO: 4650 - protein, 48 aa, Homosapiens [sequence omitted]

SEQ ID NO: 4651 - DNA, 2491 bp, Homosapiens
aaaacccgcgggcctggccgggtgcaggccacccttgccggcggatcggaatccccgcccacaccgtggtctttccagcaccgcagacacctgccggctcctcccgagcggagctcagggctgacaaagcgcggtcagagcggccgcttactggggctcgcccgctccttagagcactggcaatgatgtgcggatcctcgctgctgctgctgggaaactgttgagtggctgaatgaccccaggggaccctgggagagctctgaagccctcagccaccaagtggctgggctggcaagggttcattcattcattcaacaaatacgaatgtgcagcggtgctggggtcatgatggctcggtgggcagcgaggggccgggccggctggaggagcacagtgcggattctgtcgccactgggacactgtgaaccaggagtgagtcggagctgccgcgctgcccaggccatggactgtgaggtcaacaacggttccagcctcagggatgagtgcatcacaaacctactggtgtttggcttcctccaaagctgttctgacaacagcttccgcagagagctggacgcactgggccacgagctgccagtgctggctccccagtgggagggctacgatgagctgcagactgatggcaaccgcagcagccactcccgcttgggaagaatagaggcagattctgaaagtcaagaagacatcatccggaatattgccaggcacctcgcccaggtcggggacagcatggaccgtagcatccctccgggcctggtgaacggcctggccctgcagctcaggaacaccagccggtcggaggaggaccggaacagggacctggccactgccctggagcagctgctgcaggcctaccctagagacatggagaaggagaagaccatgctggtgctggccctgctgctggccaagaaggtggccagtcacacgccgtccttgctccgtgatgtctttcacacaacagtgaattttattaaccagaacctacgcacctacgtgaggagcttagccagaaatgggatggactgaacggacagttccagaagtgtgactggctaaagctcgatgtggtcacagctgtatagctgcttccagtgtagacggagccctggcatgtcaacagcgttcctagagaagacaggctggaagatagctgtgacttctattttaaagacaatgttaaacttataacccactttaaaatatctacattaatatacttgaatgaaaatgtccatttacacgtatttgaatggccttcatatcatccacacatgaatctgcacatctgtaaatctacacacggtgcctttatttccactgtgcaggttcccacttaaaaattaaattggaaagcaggtttcaaggaagtagaaacaaaatacaatttttttggtaaaaaaaaattactgtttattaaagtacaaccatagaggatggtcttacagcaggcagtatcctgtttgaggaaagcaagaatcagagaaggaacataccccttacaaatgaaaaattccactcaaaatagggactatctatcttaatactaaggaaccaacaatcttcctgtttaaaaaaccacatggcacagagattctgaactaaagtgctgcactcaaatgatgggaagtccggccccagtacacaggggcttgactttttcaacttcgtttcctttgttggagtcaaaaagaaccacttgtggttctaaaaggtgtgaaggtgatttaagggcccaggtcagccactgtttgtttacaaaatcaggtaactaactgcatacactttttctctttccatgacatcaagactttgctaaagacatgaagccacgggtgccagaagctactgcgatgccccgggagttagccccctggtaatagctgtaaacttccaatttctagccatacgctcagctcatccatgcctcagaagtgcatctggagagaacaggtttctaagcataaaagatgaaagagcagttggactttttaaaaattcagcaaagtggttccctctcttagggacagtcaaaaccaagtcacttaggtagtaccaaaataaataaggaaaagcttagctttagaaacagtgcaacactggtctgctgttccagtggtaagctatgtcccaggaatcagtttaaaagcacgacagtggatgctgggtccatatcacacacattgctgtgaacaggaaactcctgtgaccacaacatgaggccactggagacgcatatgagtaagggcactgacggactcatgatttcttcttaccagatgctttcctgttctttaagagtttaaaatcatcagaaaggaaaaacaaactctatattgttcagcatgcaatacataccacgctagggctggctcaattgaaagtgggcaaaagcttacaaatactaaaaagaagtgctgccgcgcagtgtggaggccactgtttggaaataaatcttcctaacactacg

SEQ ID NO: 4652 - protein, 241 aa, Homosapiens; identical to SEQ ID NO: 660

SEQ ID NO: 4653 - DNA, 1966 bp, Homosapiens
ggaggaagcgggtagtcgaccgtgtccgcgcgcctgggagacgctgcctcggcccggacgcgcccgcgcccccgcggctggagggtggtcgccactgggacactgtgaaccaggagtgagtcggagctgccgcgctgcccaggccatggactgtgaggtcaacaacggttccagcctcagggatgagtgcatcacaaacctactggtgtttggcttcctccaaagctgttctgacaacagcttccgcagagagtgaacggcctggccctgcagctcaggaacaccagccggtcggaggaggaccggaacagggacctggccactgccctggagcagctgctgcaggcctaccctagagacatggagaaggagaagaccatgctggtgctggccctgctgctggccaagaaggtggccagtcacacgccgtccttgctccgtgatgtctttcacacaacagtgaattttattaaccagaacctacgcacctacgtgaggagcttagccagaaatgggatggactgaacggacagttccagaagtgtgactggctaaagctcgatgtggtcacagctgtatagctgcttccagtgtagacggagccctggcatgtcaacagcgttcctagagaagacaggctggaagatagctgtgacttctattttaaagacaatgttaaacttataacccactttaaaatatctacattaatatacttgaatgaaaatgtccatttacacgtatttgaatggccttcatatcatccacacatgaatctgcacatctgtaaatctacacacggtgcctttatttccactgtgcaggttcccacttaaaaattaaattggaaagcaggtttcaaggaagtagaaacaaaatacaatttttttggtaaaaaaaaattactgtttattaaagtacaaccatagaggatggtcttacagcaggcagtatcctgtttgaggaaagcaagaatcagagaaggaacataccccttacaaatgaaaaattccactcaaaatagggactatctatcttaatactaaggaaccaacaatcttcctgtttaaaaaaccacatggcacagagattctgaactaaagtgctgcactcaaatgatgggaagtccggccccagtacacaggggcttgactttttcaacttcgtttcctttgttggagtcaaaaagaaccacttgtggttctaaaaggtgtgaaggtgatttaagggcccaggtcagccactgtttgtttacaaaatcaggtaactaactgcatacactttttctctttccatgacatcaagactttgctaaagacatgaagccacgggtgccagaagctactgcgatgccccgggagttagccccctggtaatagctgtaaacttccaatttctagccatacgctcagctcatccatgcctcagaagtgcatctggagagaacaggtttctaagcataaaagatgaaagagcagttggactttttaaaaattcagcaaagtggttccctctcttagggacagtcaaaaccaagtcacttaggtagtaccaaaataaataaggaaaagcttagctttagaaacagtgcaacactggtctgctgttccagtggtaagctatgtcccaggaatcagtttaaaagcacgacagtggatgctgggtccatatcacacacattgctgtgaacaggaaactcctgtgaccacaacatgaggccactggagacgcatatgagtaagggcactgacggactcatgatttcttcttaccagatgctttcctgttctttaagagtttaaaatcatcagaaaggaaaaacaaactctatattgttcagcatgcaatacataccacgctagggctggctcaattgaaagtgggcaaaagcttacaaatactaaaaagaagtgctgccgcgcagtgtggaggccactgtttggaaataaatcttcctaacactacg

SEQ ID NO: 4654 - protein, 57 aa, Homosapiens; identical to SEQ ID NO: 4640

SEQ ID NO: 4655 - DNA, 1912 bp, Homosapiens
agcgcgcggggcgccataaggaggaagcgggtagtcgaccgtgtccgcgcgcctgggagacgctgcctcggcccggacgcgcccgcgcccccgcggctggagggtgattctgaaagtcaagaagacatcatccggaatattgccaggcacctcgcccaggtcggggacagcatggaccgtagcatccctccgggcctggtgaacggcctggccctgcagctcaggaacaccagccggtcggaggaggaccggaacagggacctggccactgccctggagcagctgctgcaggcctaccctagagacatggagaaggagaagaccatgctggtgctggccctgctgctggccaagaaggtggccagtcacacgccgtccttgctccgtgatgtctttcacacaacagtgaattttattaaccagaacctacgcacctacgtgaggagcttagccagaaatgggatggactgaacggacagttccagaagtgtgactggctaaagctcgatgtggtcacagctgtatagctgcttccagtgtagacggagccctggcatgtcaacagcgttcctagagaagacaggctggaagatagctgtgacttctattttaaagacaatgttaaacttataacccactttaaaatatctacattaatatacttgaatgaaaatgtccatttacacgtatttgaatggccttcatatcatccacacatgaatctgcacatctgtaaatctacacacggtgcctttatttccactgtgcaggttcccacttaaaaattaaattggaaagcaggtttcaaggaagtagaaacaaaatacaatttttttggtaaaaaaaaattactgtttattaaagtacaaccatagaggatggtcttacagcaggcagtatcctgtttgaggaaagcaagaatcagagaaggaacataccccttacaaatgaaaaattccactcaaaatagggactatctatcttaatactaaggaaccaacaatcttcctgtttaaaaaaccacatggcacagagattctgaactaaagtgctgcactcaaatgatgggaagtccggccccagtacacaggggcttgactttttcaacttcgtttcctttgttggagtcaaaaagaaccacttgtggttctaaaaggtgtgaaggtgatttaagggcccaggtcagccactgtttgtttacaaaatcaggtaactaactgcatacactttttctctttccatgacatcaagactttgctaaagacatgaagccacgggtgccagaagctactgcgatgccccgggagttagccccctggtaatagctgtaaacttccaatttctagccatacgctcagctcatccatgcctcagaagtgcatctggagagaacaggtttctaagcataaaagatgaaagagcagttggactttttaaaaattcagcaaagtggttccctctcttagggacagtcaaaaccaagtcacttaggtagtaccaaaataaataaggaaaagcttagctttagaaacagtgcaacactggtctgctgttccagtggtaagctatgtcccaggaatcagtttaaaagcacgacagtggatgctgggtccatatcacacacattgctgtgaacaggaaactcctgtgaccacaacatgaggccactggagacgcatatgagtaagggcactgacggactcatgatttcttcttaccagatgctttcctgttctttaagagtttaaaatcatcagaaaggaaaaacaaactctatattgttcagcatgcaatacataccacgctagggctggctcaattgaaagtgggcaaaagcttacaaatactaaaaagaagtgctgccgcgcagtgtggaggccactgtttggaaataaatcttcctaacactacg

SEQ ID NO: 4656 - protein, 99 aa, Homosapiens; identical to SEQ ID NO: 662

SEQ ID NO: 4657 - DNA, 2132 bp, Homosapiens
gaaggaggaagcgcgcggggcgccataaggaggaagcgggtagtcgaccgtgtccgcgcgcctgggagacgctgcctcggcccggacgcgcccgcgcccccgcggctggagggtggtcaacaacggttccagcctcagggatgagtgcatcacaaacctactggtgtttggcttcctccaaagctgttctgacaacagcttccgcagagagctggacgcactgggccacgagctgccagtgctggctccccagtgggagggctacgatgagctgcagactgatggcaaccgcagcagccactcccgcttgggaagaatagaggcagattctgaaagtcaagaagacatcatccggaatattgccaggcacctcgcccaggtcggggacagcatggaccgtagcatccctccgggcctggtgaacggcctggccctgcagctcaggaacaccagccggtcggaggaggaccggaacagggacctggccactgccctggagcagctgctgcaggcctaccctagagacatggagaaggagaagaccatgctggtgctggccctgctgctggccaagaaggtggccagtcacacgccgtccttgctccgtgatgtctttcacacaacagtgaattttattaaccagaacctacgcacctacgtgaggagcttagccagaaatgggatggactgaacggacagttccagaagtgtgactggctaaagctcgatgtggtcacagctgtatagctgcttccagtgtagacggagccctggcatgtcaacagcgttcctagagaagacaggctggaagatagctgtgacttctattttaaagacaatgttaaacttataacccactttaaaatatctacattaatatacttgaatgaaaatgtccatttacacgtatttgaatggccttcatatcatccacacatgaatctgcacatctgtaaatctacacacggtgcctttatttccactgtgcaggttcccacttaaaaattaaattggaaagcaggtttcaaggaagtagaaacaaaatacaatttttttggtaaaaaaaaattactgtttattaaagtacaaccatagaggatggtcttacagcaggcagtatcctgtttgaggaaagcaagaatcagagaaggaacataccccttacaaatgaaaaattccactcaaaatagggactatctatcttaatactaaggaaccaacaatcttcctgtttaaaaaaccacatggcacagagattctgaactaaagtgctgcactcaaatgatgggaagtccggccccagtacacaggggcttgactttttcaacttcgtttcctttgttggagtcaaaaagaaccacttgtggttctaaaaggtgtgaaggtgatttaagggcccaggtcagccactgtttgtttacaaaatcaggtaactaactgcatacactttttctctttccatgacatcaagactttgctaaagacatgaagccacgggtgccagaagctactgcgatgccccgggagttagccccctggtaatagctgtaaacttccaatttctagccatacgctcagctcatccatgcctcagaagtgcatctggagagaacaggtttctaagcataaaagatgaaagagcagttggactttttaaaaattcagcaaagtggttccctctcttagggacagtcaaaaccaagtcacttaggtagtaccaaaataaataaggaaaagcttagctttagaaacagtgcaacactggtctgctgttccagtggtaagctatgtcccaggaatcagtttaaaagcacgacagtggatgctgggtccatatcacacacattgctgtgaacaggaaactcctgtgaccacaacatgaggccactggagacgcatatgagtaagggcactgacggactcatgatttcttcttaccagatgctttcctgttctttaagagtttaaaatcatcagaaaggaaaaacaaactctatattgttcagcatgcaatacataccacgctagggctggctcaattgaaagtgggcaaaagcttacaaatactaaaaagaagtgctgccgcgcagtgtggaggccactgtttggaaataaatcttcctaacactacg

SEQ ID NO: 4658 - protein, 99 aa, Homosapiens; identical to SEQ ID NO: 662

SEQ ID NO: 4659 - DNA, 2297 bp, Homosapiens
gaaggaggaagcgcgcggggcgccataaggaggaagcgggtagtcgaccgtgtccgcgcgcctgggagacgctgcctcggcccggacgcgcccgcgcccccgcggctggagggtggtcgccactgggacactgtgaaccaggagtgagtcggagctgccgcgctgcccaggccatggactgtgaggtcaacaacggttccagcctcagggatgagtgcatcacaaacctactggtgtttggcttcctccaaagctgttctgacaacagcttccgcagagagctggacgcactgggccacgagctgccagtgctggctccccagtgggagggctacgatgagctgcagactgatggcaaccgcagcagccactcccgcttgggaagaatagaggcaggggcgtcagacaataacacagcaagtgctgaggaagaaacggaggcggcagggagcgtggcagttgagcgtggccttcatggagctgcgacagtgattctgaaagtcaagaagacatcatccggaatattgccaggcacctcgcccaggtcggggacagcatggaccgtagcatccctccgggcctggtgaacggcctggccctgcagctcaggaacaccagccggtcggaggaggaccggaacagggacctggccactgccctggagcagctgctgcaggcctaccctagagacatggagaaggagaagaccatgctggtgctggccctgctgctggccaagaaggtggccagtcacacgccgtccttgctccgtgatgtctttcacacaacagtgaattttattaaccagaacctacgcacctacgtgaggagcttagccagaaatgggatggactgaacggacagttccagaagtgtgactggctaaagctcgatgtggtcacagctgtatagctgcttccagtgtagacggagccctggcatgtcaacagcgttcctagagaagacaggctggaagatagctgtgacttctattttaaagacaatgttaaacttataacccactttaaaatatctacattaatatacttgaatgaaaatgtccatttacacgtatttgaatggccttcatatcatccacacatgaatctgcacatctgtaaatctacacacggtgcctttatttccactgtgcaggttcccacttaaaaattaaattggaaagcaggtttcaaggaagtagaaacaaaatacaatttttttggtaaaaaaaaattactgtttattaaagtacaaccatagaggatggtcttacagcaggcagtatcctgtttgaggaaagcaagaatcagagaaggaacataccccttacaaatgaaaaattccactcaaaatagggactatctatcttaatactaaggaaccaacaatcttcctgtttaaaaaaccacatggcacagagattctgaactaaagtgctgcactcaaatgatgggaagtccggccccagtacacaggggcttgactttttcaacttcgtttcctttgttggagtcaaaaagaaccacttgtggttctaaaaggtgtgaaggtgatttaagggcccaggtcagccactgtttgtttacaaaatcaggtaactaactgcatacactttttctctttccatgacatcaagactttgctaaagacatgaagccacgggtgccagaagctactgcgatgccccgggagttagccccctggtaatagctgtaaacttccaatttctagccatacgctcagctcatccatgcctcagaagtgcatctggagagaacaggtttctaagcataaaagatgaaagagcagttggactttttaaaaattcagcaaagtggttccctctcttagggacagtcaaaaccaagtcacttaggtagtaccaaaataaataaggaaaagcttagctttagaaacagtgcaacactggtctgctgttccagtggtaagctatgtcccaggaatcagtttaaaagcacgacagtggatgctgggtccatatcacacacattgctgtgaacaggaaactcctgtgaccacaacatgaggccactggagacgcatatgagtaagggcactgacggactcatgatttcttcttaccagatgctttcctgttctttaagagtttaaaatcatcagaaaggaaaaacaaactctatattgttcagcatgcaatacataccacgctagggctggctcaattgaaagtgggcaaaagcttacaaatactaaaaagaagtgctgccgcgcagtgtggaggccactgtttggaaataaatcttcctaacactacg

SEQ ID NO: 4660 - protein, 137 aa, Homosapiens; identical to SEQ ID NO: 4646

SEQ ID NO: 4661 - DNA, 2202 bp, Homosapiens
gaaggaggaagcgcgcggggcgccataaggaggaagcgggtagtcgaccgtgtccgcgcgcctgggagacgctgcctcggcccggacgcgcccgcgcccccgcggctggagggtggtcgccactgggacactgtgaaccaggagtgagtcggagctgccgcgctgcccaggccatggactgtgaggtcaacaacggttccagcctcagggatgagtgcatcacaaacctactggtgtttggcttcctccaaagctgttctgacaacagcttccgcagagagctggacgcactgggccacgagctgccagtgctggctccccagtgggagggctacgatgagctgcagactgatggcaaccgcagcagccactcccgcttgggaagaatagaggcagattctgaaagtcaagaagacatcatccggaatattgccaggcacctcgcccaggtcggggacagcatggaccgtagcatccctccgggcctggtgaacggcctggccctgcagctcaggaacaccagccggtcggaggaggaccggaacagggacctggccactgccctggagcagctgctgcaggcctaccctagagacatggagaaggagaagaccatgctggtgctggccctgctgctggccaagaaggtggccagtcacacgccgtccttgctccgtgatgtctttcacacaacagtgaattttattaaccagaacctacgcacctacgtgaggagcttagccagaaatgggatggactgaacggacagttccagaagtgtgactggctaaagctcgatgtggtcacagctgtatagctgcttccagtgtagacggagccctggcatgtcaacagcgttcctagagaagacaggctggaagatagctgtgacttctattttaaagacaatgttaaacttataacccactttaaaatatctacattaatatacttgaatgaaaatgtccatttacacgtatttgaatggccttcatatcatccacacatgaatctgcacatctgtaaatctacacacggtgcctttatttccactgtgcaggttcccacttaaaaattaaattggaaagcaggtttcaaggaagtagaaacaaaatacaatttttttggtaaaaaaaaattactgtttattaaagtacaaccatagaggatggtcttacagcaggcagtatcctgtttgaggaaagcaagaatcagagaaggaacataccccttacaaatgaaaaattccactcaaaatagggactatctatcttaatactaaggaaccaacaatcttcctgtttaaaaaaccacatggcacagagattctgaactaaagtgctgcactcaaatgatgggaagtccggccccagtacacaggggcttgactttttcaacttcgtttcctttgttggagtcaaaaagaaccacttgtggttctaaaaggtgtgaaggtgatttaagggcccaggtcagccactgtttgtttacaaaatcaggtaactaactgcatacactttttctctttccatgacatcaagactttgctaaagacatgaagccacgggtgccagaagctactgcgatgccccgggagttagccccctggtaatagctgtaaacttccaatttctagccatacgctcagctcatccatgcctcagaagtgcatctggagagaacaggtttctaagcataaaagatgaaagagcagttggactttttaaaaattcagcaaagtggttccctctcttagggacagtcaaaaccaagtcacttaggtagtaccaaaataaataaggaaaagcttagctttagaaacagtgcaacactggtctgctgttccagtggtaagctatgtcccaggaatcagtttaaaagcacgacagtggatgctgggtccatatcacacacattgctgtgaacaggaaactcctgtgaccacaacatgaggccactggagacgcatatgagtaagggcactgacggactcatgatttcttcttaccagatgctttcctgttctttaagagtttaaaatcatcagaaaggaaaaacaaactctatattgttcagcatgcaatacataccacgctagggctggctcaattgaaagtgggcaaaagcttacaaatactaaaaagaagtgctgccgcgcagtgtggaggccactgtttggaaataaatcttcctaacactacg

SEQ ID NO: 4662 - protein, 195 aa, Homosapiens; identical to SEQ ID NO: 658

SEQ ID NO: 4663 - DNA, 935 bp, Homosapiens
ggtcgccactgggacactgtgaaccaggagtgagtcggagctgccgcgctgcccaggccatggactattctgaaagtcaagaagacatcatccggaatattgccaggcacctcgcccaggtcggggacagcatggaccgtagcatccctccgggcctggtgaacggcctggccctgcagctcaggaacaccagccggtcggaggaggaccggaacagggacctggccactgccctggagcagctgctgcaggcctaccctagagacatggagaaggagaagaccatgctggtgctggccctgctgctggccaagaaggtggccagtcacacgccgtccttgctccgtgatgtctttcacacaacagtgaattttattaaccagaacctacgcacctacgtgaggagcttagccagaaatgggatggactgaacggacagttccagaagtgtgactggctaaagctcgatgtggtcacagctgtatagctgcttccagtgtagacggagccctggcatgtcaacagcgttcctagagaagacaggctggaagatagctgtgacttctattttaaagacaatgttaaacttataacccactttaaaatatctacattaatatacttgaatgaaaatgtccatatcacacacattgctgtgaacaggaaactcctgtgaccacaacatgaggccactggagacgcatatgagtaagggcactgacggactcatgatttcttcttaccagatgctttcctgttctttaagagtttaaaatcatcagaaaggaaaaacaaactctatattgttcagcatgcaatacataccacgctagggctggctcaattgaaagtgggcaaaagcttacaaatactaaaaagaagtgctgccgcgcagtgtggaggccactgtttggaaataaatcttcctaacacta

SEQ ID NO: 4664 - protein, 123 aa, Homosapiens
MDYSESQEDIIRNIARHLAQVGDSMDRSIPPGLVNGLALQLRNTSRSEEDRNRDLATALEQLLQAYPRDMEKEKTMLVLALLLAKKVASHTPSLLRDVFHTTVNFINQNLRTYVRSLARNGMD

SEQ ID NO: 4665 - DNA, 1265 bp, Homosapiens
gaaggaggaagcgcgcggggcgccataaggaggaagcgggtagtcgaccgtgtccgcgcgcctgggagacgctgcctcggcccggacgcgcccgcgcccccgcggctggagggtggtcgccactgggacactgtgaaccaggagtgagtcggagctgccgcgctgcccaggccatggactgtgaggtcaacaacggttccagcctcagggatgagtgcatcacaaacctactggtgtttggcttcctccaaagctgttctgacaacagcttccgcagagagctggacgcactgggccacgagctgccagtgctggctccccagtgggagggctacgatgagctgcagactgatggcaaccgcagcagccactcccgcttgggaagaatagaggcagattctgaaagtcaagaagacatcatccggaatattgccaggcacctcgcccaggtcggggacagcatggaccgtagcatccctccgggcctggtgaacggcctggccctgcagctcaggaacaccagccggtcggaggaggaccggaacagggacctggccactgccctggagcagctgctgcaggcctaccctagagacatggagaaggagaagaccatgctggtgctggccctgctgctggccaagaaggtggccagtcacacgccgtccttgctccgtgatgtctttcacacaacagtgaattttattaaccagaacctacgcacctacgtgaggagcttagccagaaatgggatggactgaacggacagttccagaagtgtgactggctaaagctcgatgtggtcacagctgtatagctgcttccagtgtagacggagccctggcatgtcaacagcgttcctagagaagacaggctggaagatagctgtgacttctattttaaagacaatgttaaacttataacccactttaaaatatctacattaatatacttgaatgaaaatgtccatatcacacacattgctgtgaacaggaaactcctgtgaccacaacatgaggccactggagacgcatatgagtaagggcactgacggactcatgatttcttcttaccagatgctttcctgttctttaagagtttaaaatcatcagaaaggaaaaacaaactctatattgttcagcatgcaatacataccacgctagggctggctcaattgaaagtgggcaaaagcttacaaatactaaaaagaagtgctgccgcgcagtgtggaggccactgtttggaaataaatcttcctaacacta

SEQ ID NO: 4666 - protein, 195 aa, Homosapiens; identical to SEQ ID NO: 658

SEQ ID NO: 4667 - DNA, 2439 bp, Homosapiens
gactggacggcagggagtggggctgtcatcatcagatgagagctaaggggacccccaccagggtggcggcaatggcagagggtaggcaaaacgcttgtatttgcaacataaggtgagatttgacagctgaccgagggtgggagcagcagccaaaaccaaaaaagccagagggaagttgcaagcacagaaaaaatagaagatttaatgggagaaataacaatagctggcatctattgaacacttactgggagctaggtacagggcccattcattcattcatgcaattaaaactttttttaagaaacggggtcttgctctgttgcccaggctggagtgtagtggtatgatcacagctcactgcagccttgaattcctggcctcaaggagtcctcccacctcagcctcctgtgtagctgggattataggtacgtgcggtacacctggctccctttaaaagttttttgtagaggcagggcacagtggctcacacctgtaatcccagcactttgggaggccaaggcaggaggatcacaaggtcaggagttcgagaccagcctgaccaacatggtgaaacccgtctctacttaaaatacaaaaattagccgggtgtggtggcgggcgcctgtaatcccagctactcaggaggctgaagcatgagacttgcttgaacccaggaggcgaaggttgcagtgagccgagatcgcgccactgcactccagcctgggtgacagagcaagactccgtctcaaaaaaaaaaaaaaagtttcttgtagaggcagggccttgctttgttgctggtgcaatcacggctcactgcatcctctaactcctggccttaagcaatcttctgtcctcagcctcccaaagcactgggattacaggcatgcatgaccacacctggtccctgccattgtttattgagcacctactgagtgccatgtattaagtgctgggtatttgtcagtggacaaaacagattaaaaaaatcacagcccttagggagcttaccttctggcaggggcgtcagacaataacacagcaagtgctgaggaagaaacggaggcggcagggagcgtggcagttgagcgtggccttcatggagctgcgacagtggtactcgggcaggggcagcacggaggctgtgcgccagaggaggaggactgaggggcaagggggagagctctggttggaaaggcaggggagattctccagggccttgccggtgccagtgacaactggggttttcctgagacgggactgcgaggaatgggggctctcaggcttgagagggcaaaagtgggtctgggatgccgtctgcccacagagccccttccccaacggctgcccaggccaaggccaaccctgttgggttgtgtggtgtgagccatgaagccgctgccaggcttgtacctcaggcgtggtcgtgatgccccagcttcaccggccctgcctgtggggacgtggtgcctgtgtgcgggagcctgggcctcagccgaggccctgagctccggcactgcccagaacccagctcagcgctggtactcagcccgcccgctgtggccctggtggagtggagcacgtgcccagtgggggctggccttgtcccatcgcggacctgtcctttcccggggcagggtggtgtgggagagggtatcagggacattttctgagtctgctctgtctctgccgcccctgcctgaacacagattctgaaagtcaagaagacatcatccggaatattgccaggcacctcgcccaggtcggggacagcatggaccgtagcatccctccgggcctggtgaacggcctggccctgcagctcaggaacaccagccggtcggaggaggaccggaacagggacctggccactgccctggagcagctgctgcaggcctaccctagagacatggagaaggagaagaccatgctggtgctggccctgctgctggccaagaaggtggccagtcacacgccgtccttgctccgtgatgtctttcacacaacagtgaattttattaaccagaacctacgcacctacgtgaggagcttagccagaaatgggatggactgaacggacagttccagaagtgtgactggctaaagctcgatgtggtcacagctgtatagctgcttccagtgtagacggagccctggcatgtcaacagcgttcctagagaagacaggctggaagatagctgtgacttctattttaaagacaatgttaaacttataacccactttaaaatatctacattaatatacttgaatgaaaatgtccatttacacgtatttgaatggccttcatatcatccacacatgaatctgcacatctgtaaatctacacacggtgcctttatttccactgtgcaggttcccacttaaaaattaaattggaaagcaggtttcaaggaagtagaaacaaaatacaatttttttggt

SEQ ID NO: 4668 - protein, 99 aa, Homosapiens; identical to SEQ ID NO: 662

SEQ ID NO: 4669 - DNA, 1388 bp, Homosapiens
acccttgccggcggatcggaatccccgcccacaccgtggtctttccagcaccgcagacacctgccggctcctcccgagcggagctcagggctgacaaagcgcggtcagagcggccgcttactggggctcgcccgctccttagagcactggcaatgatgtgcggatcctcgctgctgctgctgggaaactgttgagtggctgaatgaccccaggggaccctgggagagctctgaagccctcagccaccaagtggctgggctggcaagggttcattcattcattcaacaaatacgaatgtgcagcggtgctggggtcatgatggctcggtgggcagcgaggggccgggccggctggaggagcacagtgcggattctgtcgccactgggacactgtgaaccaggagtgagtcggagctgccgcgctgcccaggccatggactgtgaggtcaacaacggttccagcctcagggatgagtgcatcacaaacctactggtgtttggcttcctccaaagctgttctgacaacagcttccgcagagagctggacgcactgggccacgagctgccagtgctggctccccagtgggagggctacgatgagctgcagactgatggcaaccgcagcagccactcccgcttgggaagaatagaggcagattctgaaagtcaagaagacatcatccggaatattgccaggcacctcgcccaggtcggggacagcatggaccgtagcatccctccgggcctggtgaacggcctggccctgcagctcaggaacaccagccggtcggaggaggaccggaacagggacctggccactgccctggagcagctgctgcaggcctaccctagagacatggagaaggagaagaccatgctggtgctggccctgctgctggccaagaaggtggccagtcacacgccgtccttgctccgtgatgtctttcacacaacagtgaattttattaaccagaacctacgcacctacgtgaggagcttagccagaaatgggatggactgaacggacagttccagaagtgtgactggctaaagctcgatgtggtcacagctgtatagctgcttccagtgtagacggagccctggcatgtcaacagcgttcctagagaagacaggctggaagatagctgtgacttctattttaaagacaatgttaaacttataacccactttaaaatatctacattaatatacttgaatgaaaatgtccatttacacgtatttgaatggccttcatatcatccacacatgaatctgcacatctgtaaatctacacacggtgcctttatttccactgtgcaggttcccacttaaaaattaaattggaaagcaggtttcaaggaagtagaaacaaaatacaatttttttggt

SEQ ID NO: 4670 - protein, 241 aa, Homosapiens; identical to SEQ ID NO: 660

SEQ ID NO: 4671 - DNA, 1059 bp, Homosapiens
gaaggaggaagcgcgcggggcgccataaggaggaagcgggtagtcgaccgtgtccgcgcgcctgggagacgctgcctcggcccggacgcgcccgcgcccccgcggctggagggtggtcaacaacggttccagcctcagggatgagtgcatcacaaacctactggtgtttggcttcctccaaagctgttctgacaacagcttccgcagagagctggacgcactgggccacgagctgccagtgctggctccccagtgggagggctacgatgagctgcagactgatggcaaccgcagcagccactcccgcttgggaagaatagaggcagattctgaaagtcaagaagacatcatccggaatattgccaggcacctcgcccaggtcggggacagcatggaccgtagcatccctccgggcctggtgaacggcctggccctgcagctcaggaacaccagccggtcggaggaggaccggaacagggacctggccactgccctggagcagctgctgcaggcctaccctagagacatggagaaggagaagaccatgctggtgctggccctgctgctggccaagaaggtggccagtcacacgccgtccttgctccgtgatgtctttcacacaacagtgaattttattaaccagaacctacgcacctacgtgaggagcttagccagaaatgggatggactgaacggacagttccagaagtgtgactggctaaagctcgatgtggtcacagctgtatagctgcttccagtgtagacggagccctggcatgtcaacagcgttcctagagaagacaggctggaagatagctgtgacttctattttaaagacaatgttaaacttataacccactttaaaatatctacattaatatacttgaatgaaaatgtccatttacacgtatttgaatggccttcatatcatccacacatgaatctgcacatctgtaaatctacacacggtgcctttatttccactgtgcaggttcccacttaaaaattaaattggaaagcaggtttcaaggaagtagaaacaaaatacaatttttttggt

SEQ ID NO: 4672 - protein, 99 aa, Homosapiens; identical to SEQ ID NO: 662

SEQ ID NO: 4673 - DNA, 1129 bp, Homosapiens
gaaggaggaagcgcgcggggcgccataaggaggaagcgggtagtcgaccgtgtccgcgcgcctgggagacgctgcctcggcccggacgcgcccgcgcccccgcggctggagggtggtcgccactgggacactgtgaaccaggagtgagtcggagctgccgcgctgcccaggccatggactgtgaggtcaacaacggttccagcctcagggatgagtgcatcacaaacctactggtgtttggcttcctccaaagctgttctgacaacagcttccgcagagagctggacgcactgggccacgagctgccagtgctggctccccagtgggagggctacgatgagctgcagactgatggcaaccgcagcagccactcccgcttgggaagaatagaggcagattctgaaagtcaagaagacatcatccggaatattgccaggcacctcgcccaggtcggggacagcatggaccgtagcatccctccgggcctggtgaacggcctggccctgcagctcaggaacaccagccggtcggaggaggaccggaacagggacctggccactgccctggagcagctgctgcaggcctaccctagagacatggagaaggagaagaccatgctggtgctggccctgctgctggccaagaaggtggccagtcacacgccgtccttgctccgtgatgtctttcacacaacagtgaattttattaaccagaacctacgcacctacgtgaggagcttagccagaaatgggatggactgaacggacagttccagaagtgtgactggctaaagctcgatgtggtcacagctgtatagctgcttccagtgtagacggagccctggcatgtcaacagcgttcctagagaagacaggctggaagatagctgtgacttctattttaaagacaatgttaaacttataacccactttaaaatatctacattaatatacttgaatgaaaatgtccatttacacgtatttgaatggccttcatatcatccacacatgaatctgcacatctgtaaatctacacacggtgcctttatttccactgtgcaggttcccacttaaaaattaaattggaaagcaggtttcaaggaagtagaaacaaaatacaatttttttggt

SEQ ID NO: 4674 - protein, 195 aa, Homosapiens; identical to SEQ ID NO: 658

SEQ ID NO: 4675 - DNA, 1070 bp, Homosapiens
gaaggaggaagcgcgcggggcgccataaggaggaagcgggtagtcgaccgtgtccgcgcgcctgggagacgctgcctcggcccggacgcgcccgcgcccccgcggctggagggtggtcgccactgggacactgtgaaccaggagtgagtcggagctgccgcgctgcccaggccatggactgtgaggtcaacaacggttccagcctcagggatgagtgcatcacaaacctactggtgtttggcttcctccaaagctgttctgacaacagcttccgcagagagctggacgcactgggccacgagctgccagtgctggctccccagtgggagggctacgatgagctgcagactgatggcaaccgcagcagccactcccgcttgggaagaatagaggcagattctgaaagtcaagaagacatcatccggaatattgccaggcacctcgcccaggtcggggacagcatggaccgtagcatccctccgggcctggtgaacggcctggccctgcagctcaggaacaccagccggtcggaggaggaccggaacagggacctggccactgccctggagcagctgctgcaggcctaccctagagacatggagaaggagaagaccatgctggtgctggccctgctgctggccaagaaggtggccagtcacacgccgtccttgctccgtgatgtctttcacacaacagtgaattttattaaccagaacctacgcacctacgtgaggagcttagccagaaatgggatggactgaacggacagttccagaagtgtgactggctaaagctcgatgtggtcacagctgtatagctgcttccagtgtagacggagccctggcatgtcaacagcgttcctagagaagacaggctggaagatagctgtgacttctattttaaagacaatgttaaacttataacccactttaaaatatctacattaatatacttgaatgaaaatgtccatttacacgtatttgaatggccttcatatcatccacacatgaatctgcacatctgtaaatctacacacggtgcctttatttccactgtgcaggttcccactt

SEQ ID NO: 4676 - protein, 195 aa, Homosapiens; identical to SEQ ID NO: 658

SEQ ID NO: 4677 - DNA, 1226 bp, Homosapiens
acccttgccggcggatcggaatccccgcccacaccgtggtctttccagcaccgcagacacctgccggctcctcccgagcggagctcagggctgacaaagcgcggtcagagcggccgcttactggggctcgcccgctccttagagcactggcaatgatgtgcggatcctcgctgctgctgctgggaaactgttgagtggctgaatgaccccaggggaccctgggagagctctgaagccctcagccaccaagtggctgggctggcaagggttcattcattcattcaacaaatacgaatgtgcagcggtgctggggtcatgatggctcggtgggcagcgaggggccgggccggctggaggagcacagtgcggattctgtcgccactgggacactgtgaaccaggagtgagtcggagctgccgcgctgcccaggccatggactgtgaggtcaacaacggttccagcctcagggatgagtgcatcacaaacctactggtgtttggcttcctccaaagctgttctgacaacagcttccgcagagagctggacgcactgggccacgagctgccagtgctggctccccagtgggagggctacgatgagctgcagactgatggcaaccgcagcagccactcccgcttgggaagaatagaggcagattctgaaagtcaagaagacatcatccggaatattgccaggcacctcgcccaggtcggggacagcatggaccgtagcatccctccgggcctggtgaacggcctggccctgcagctcaggaacaccagccggtcggaggaggaccggaacagggacctggccactgccctggagcagctgctgcaggcctaccctagagacatggagaaggagaagaccatgctggtgctggccctgctgctggccaagaaggtggccagtcacacgccgtccttgctccgtgatgtctttcacacaacagtgaattttattaaccagaacctacgcacctacgtgaggagcttagccagaaatgggatggactgaacggacagttccagaagtgtgactggctaaagctcgatgtggtcacagctgtatagctgcttccagtgtagacggagccctggcatgtcaacagcgttcctagagaagacaggctggaagatagctgtgacttctattttaaagacaatgttaaacttataacccactttaaaatatctacattaatatacttgaatgaaaatgtc

SEQ ID NO: 4678 - protein, 241 aa, Homosapiens; identical to SEQ ID NO: 660

SEQ ID NO: 4679 - DNA, 731 bp, Homosapiens
ggaggaagcgggtagtcgaccgtgtccgcgcgcctgggagacgctgcctcggcccggacgcgcccgcgcccccgcggctggagggtggtcgccactgggacactgtgaaccaggagtgagtcggagctgccgcgctgcccaggccatggactgtgaggtcaacaacggttccagcctcagggatgagtgcatcacaaacctactggtgtttggcttcctccaaagctgttctgacaacagcttccgcagagagtgaacggcctggccctgcagctcaggaacaccagccggtcggaggaggaccggaacagggacctggccactgccctggagcagctgctgcaggcctaccctagagacatggagaaggagaagaccatgctggtgctggccctgctgctggccaagaaggtggccagtcacacgccgtccttgctccgtgatgtctttcacacaacagtgaattttattaaccagaacctacgcacctacgtgaggagcttagccagaaatgggatggactgaacggacagttccagaagtgtgactggctaaagctcgatgtggtcacagctgtatagctgcttccagtgtagacggagccctggcatgtcaacagcgttcctagagaagacaggctggaagatagctgtgacttctattttaaagacaatgttaaacttataacccactttaaaatatctacattaatatacttgaatgaaaatgtc

SEQ ID NO: 4680 - protein, 57 aa, Homosapiens; identical to SEQ ID NO: 4640

SEQ ID NO: 4681 - DNA, 897 bp, Homosapiens
gaaggaggaagcgcgcggggcgccataaggaggaagcgggtagtcgaccgtgtccgcgcgcctgggagacgctgcctcggcccggacgcgcccgcgcccccgcggctggagggtggtcaacaacggttccagcctcagggatgagtgcatcacaaacctactggtgtttggcttcctccaaagctgttctgacaacagcttccgcagagagctggacgcactgggccacgagctgccagtgctggctccccagtgggagggctacgatgagctgcagactgatggcaaccgcagcagccactcccgcttgggaagaatagaggcagattctgaaagtcaagaagacatcatccggaatattgccaggcacctcgcccaggtcggggacagcatggaccgtagcatccctccgggcctggtgaacggcctggccctgcagctcaggaacaccagccggtcggaggaggaccggaacagggacctggccactgccctggagcagctgctgcaggcctaccctagagacatggagaaggagaagaccatgctggtgctggccctgctgctggccaagaaggtggccagtcacacgccgtccttgctccgtgatgtctttcacacaacagtgaattttattaaccagaacctacgcacctacgtgaggagcttagccagaaatgggatggactgaacggacagttccagaagtgtgactggctaaagctcgatgtggtcacagctgtatagctgcttccagtgtagacggagccctggcatgtcaacagcgttcctagagaagacaggctggaagatagctgtgacttctattttaaagacaatgttaaacttataacccactttaaaatatctacattaatatacttgaatgaaaatgtc

SEQ ID NO: 4682 - protein, 99 aa, Homosapiens; identical to SEQ ID NO: 662

SEQ ID NO: 4683 - DNA, 1062 bp, Homosapiens
gaaggaggaagcgcgcggggcgccataaggaggaagcgggtagtcgaccgtgtccgcgcgcctgggagacgctgcctcggcccggacgcgcccgcgcccccgcggctggagggtggtcgccactgggacactgtgaaccaggagtgagtcggagctgccgcgctgcccaggccatggactgtgaggtcaacaacggttccagcctcagggatgagtgcatcacaaacctactggtgtttggcttcctccaaagctgttctgacaacagcttccgcagagagctggacgcactgggccacgagctgccagtgctggctccccagtgggagggctacgatgagctgcagactgatggcaaccgcagcagccactcccgcttgggaagaatagaggcaggggcgtcagacaataacacagcaagtgctgaggaagaaacggaggcggcagggagcgtggcagttgagcgtggccttcatggagctgcgacagtgattctgaaagtcaagaagacatcatccggaatattgccaggcacctcgcccaggtcggggacagcatggaccgtagcatccctccgggcctggtgaacggcctggccctgcagctcaggaacaccagccggtcggaggaggaccggaacagggacctggccactgccctggagcagctgctgcaggcctaccctagagacatggagaaggagaagaccatgctggtgctggccctgctgctggccaagaaggtggccagtcacacgccgtccttgctccgtgatgtctttcacacaacagtgaattttattaaccagaacctacgcacctacgtgaggagcttagccagaaatgggatggactgaacggacagttccagaagtgtgactggctaaagctcgatgtggtcacagctgtatagctgcttccagtgtagacggagccctggcatgtcaacagcgttcctagagaagacaggctggaagatagctgtgacttctattttaaagacaatgttaaacttataacccactttaaaatatctacattaatatacttgaatgaaaatgtc

SEQ ID NO: 4684 - protein, 137 aa, Homosapiens; identical to SEQ ID NO: 4646

SEQ ID NO: 4685 - DNA, 439 bp, Homosapiens
acaaacctactggtgtttggcttcctccaaagctgttctgacaacagctgctgcaggcctaccctagagacatggagaaggagaagaccatgctggtgctggccctgctgctggccaagaaggtggccagtcacacgccgtccttgctccgtgatgtctttcacacaacagtgaattttattaaccagaacctacgcacctacgtgaggagcttagccagaaatgggatggactgaacggacagttccagaagtgtgactggctaaagctcgatgtggtcacagctgtatagctgcttccagtgtagacggagccctggcatgtcaacagcgttcctagagaagacaggctggaagatagctgtgacttctattttaaagacaatgttaaacttataacccactttaaaatatctacattaatatacttgaatgaaaat

SEQ ID NO: 4686 - protein, 54 aa, Homosapiens [sequence omitted]

SEQ ID NO: 4687 - DNA, 964 bp, Homosapiens
gaaggaggaagcgcgcggggcgccataaggaggaagcgggtagtcgaccgtgtccgcgcgcctgggagacgctgcctcggcccggacgcgcccgcgcccccgcggctggagggtggtcgccactgggacactgtgaaccaggagtgagtcggagctgccgcgctgcccaggccatggactgtgaggtcaacaacggttccagcctcagggatgagtgcatcacaaacctactggtgtttggcttcctccaaagctgttctgacaacagcttccgcagagagctggacgcactgggccacgagctgccagtgctggctccccagtgggagggctacgatgagctgcagactgatggcaaccgcagcagccactcccgcttgggaagaatagaggcagattctgaaagtcaagaagacatcatccggaatattgccaggcacctcgcccaggtcggggacagcatggaccgtagcatccctccgggcctggtgaacggcctggccctgcagctcaggaacaccagccggtcggaggaggaccggaacagggacctggccactgccctggagcagctgctgcaggcctaccctagagacatggagaaggagaagaccatgctggtgctggccctgctgctggccaagaaggtggccagtcacacgccgtccttgctccgtgatgtctttcacacaacagtgaattttattaaccagaacctacgcacctacgtgaggagcttagccagaaatgggatggactgaacggacagttccagaagtgtgactggctaaagctcgatgtggtcacagctgtatagctgcttccagtgtagacggagccctggcatgtcaacagcgttcctagagaagacaggctggaagatagctgtgacttctattttaaagacaatgttaaacttataacccactttaaaatatctacattaatatacttgaatgaaaat

SEQ ID NO: 4688 - protein, 195 aa, Homosapiens; identical to SEQ ID NO: 658

SEQ ID NO: 4689 - DNA, 1563 bp, Homosapiens
agcgtccttgaggagtccagttcctaaaagattatttcagagtccactgttgtgggctgacttgaatgctctcaaaattcgtaagttgaagccctgacccccaggacctcagaacgtgactgtgcttggacacagggactttccagaggtgattaaggtgaagtgaggtcactggatggccctcctcctatctgactggtgtcctgatggggacgcggacacccacacaggaacggacccggggagaacaacacatcgtctctgcgccagggagagaggcgtccggggaacccagccgtgcccacgcatttatctccgccttccggctcagaattgtctgggtcacttgcgaccctcctctcaggctgcttctgacaggcccaagtcacagccaacttcaggggagctgtgttggatccctccaaactccgggaatgatgtgacctccccggcgctcaccctgggcctctaggttagactcagcccagaccctggctcacagggaagcagagcccatggctggcctccacccgctcagacgcccgcacacaggccaggggagggcttgggggcagctctgggagggtccctgtttgcgctgtgggtgtccaaggctgggtgtgcagagctgaggttgccacacacctgagggactctcgcataaggatggcgcagggctggaagctggactgagacagtgaatgagacagcgctgccggctctctccgcgccgtggactggctcctaggcagtctcacgagcaagtgtgctgttgctcgtgcacgtgtgttttaactgagatgtgagctggcgcgttttctccacccggctccatctgctgggtccctccacattgctgcgcgtgtgcctccagtgccatggggtccccactgtgggcagccctgcattttgcccaactgcctcccaaaccatggaaccccagtgacctccaacttgccgccatgacgagccactctcattcatatcctcaaacacggtgctctgagcccgaatgagggtttctttagagagatatctggggaccaaactgtagggacagagctcccgtctaaggtgggcctgtggtgaggtctccccagtggtacactttaatcccacagcagggcttgcaggccgccctgctccatccccaccaacactgggcaggatctagcctccaaacctttgccagtctaatagtataaaatgatagctcggtgctattttggttttgcatttccatggtgaacaatgagtttgagagtttttgttcaaaagtcctttgggagttcgagaccagactgggccaccaggagttcaagaccagcccgggcaattcagtgagatgttcatctctacaaaaaataagaaagataaaaaattagccaggcatgtttgtgtgtgcctgtggtcccagctcctcaggaggctgaggtgggaggatggcttgaccccgggaggtggaggctgcagtgagttgtgatcgtgtcagtgcacggctagcctgggcaacagagtgagaccccgtttctaaaataaaaataaaaaacaaaagagaaaagt

SEQ ID NO: 4690 - protein, 98 aa, Homosapiens
MALLLSDWCPDGDADTHTGTDPGRTTHRLCARERGVRGTQPCPRIYLRLPAQNCLGHLRPSSQAASDRPKSQPTSGELCWIPPNSGNDVTSPALTLGL

SEQ ID NO: 4691 - DNA, 703 bp, Homosapiens
ctaagaccttgcgtttcatgtattcacagcccgcctctgaggaatgtactatcatctctttgatgacaggaaattggggcccaagaaacttgatctggggcctcaggatgcggggagctggaggccagcttttctgggggcagcccctggccagttacagctcacgaagctcgtcaaggatagagctgagaaaacaaactctgaaggctgagctcttaaccaccaagctagaggcctcccgccctcctcttgacctctgccctgggaggcctgcccagacccccgtgcccacgcaccctctgccctccagatgcacagatgcttctggtcagaaccgcaccctgctcttcagtgcaccagtgtcccttgtagagttctgtgccgtggcttctatcccaagtcactcgggagtaagctacgcgcactgtctccccatcttcacccagggatgtgaagagctggtgaccgcggagacgctggatgggacagcatcaatctcggcactcttgggaggagaacctcagaggaaagccgggaccccgtcagactgagctagcaatacgccaggtccggagctcccagtctgttactgcagcgagcctgcagaaagagtccgccatcaggaaggtggtggacttctttctccaggtgccgccactactgctctggagccgtgggaatgctgcagtctccttccacagag

SEQ ID NO: 4692 - protein, 177 aa, Homosapiens
MYSQPASEECTIISLMTGNWGPRNLIWGLRMRGAGGQLFWGQPLASYSSRSSSRIELRKQTLKAELLTTKLEASRPPLDLCPGRPAQTPVPTHPLPSRCTDASGQNRTLLFSAPVSLVEFCAVASIPSHSGVSYAHCLPIFTQGCEELVTAETLDGTASISALLGGEPQRKAGTPSD

SEQ ID NO: 4693 - DNA, 4610 bp, Homosapiens
gaccctctctcaaaaaagaacttttatatagtctccttgtttcattttcttagaggcaataaagagggtcttatgaataaaggcaaatccccaatctttgcccctcttgttgcccatggtttgttcaaagcatctgatgctcccttgagcccttggcacccacgtaggcagggggctgtggctgtccagtccgtggacttgcactggattgggccattgcctcttctgttctcgatggcgctaggcgcaacagccctggccaggccacaacctctcttcttcctagcggccagcggctgcctctgcagaccccagagtcagtccaggttcacctccacaattccttcttcagactgtacttgacttaaaagagaaacatccttgttctctctacttgggtgtcatttcttggaagactctcatggatactgctcttctgaagaaagtgacctttgataccaaacaggaaaataaaaggatcccgatttctctttgcttcccctgtaagcctcctagaagcaggaggcttggtgaaacagcctaccaatgtttttactcccacaaagttttaaaatgaccagacatccttatttgggaagcaggtgatctcagtgataaaggagcgtgtgtccctttattgttttaactgcctaacagtcggtccccactcagcctcctgtccctgtgcagaggtggggaaatgtctcactctgtggatcttaggtgtgcccgtggcactgagggctgctgcaggctggggactctgcagacctcatgccttctgcctatcagcacccccgtcctgctagcactctactctacagaggacagcttgtcctatctgcccgggtaccagctccgacatgggggacagacctctccaggcccctgttggcctgctgcccacccctgtcccaggcctccgtgcacctgactgaggaagtttctcttgttctctccagccaagaacctacacggaggaggaactgaatgccaagctgacccggcgtgtgcaaaaggcagctcggagacaggccaagcaggaggagcttaagcggctgcatcgagcccagatcatccagcggcagctgcagcaggtggaggagaggcagcggcggctggaggaaaggggcgtggctgtggagaaggcgctccggggcgaagcaggcatgggcaagaaggacgaccccaagctgatgcaggagtggttcaagctagtgcaggagaagaacgccatggtgcgctacgagtcggagctgatgatctttgcccgggagctggagctggaagaccggcagagtcgactgcagcaggagctccgggaacgcatggcagtggaagatcaccttaagactgaggaggagctgtcagaagagaagcagattctcaatgagatgctggaggtggtggagcagagagactcactggtggcgctgctggaggagcagcggctccgggagagagaggaggacaaggacctggaggctgccatgctgtccaagggcttcagccttaactggtcctgagctcccacccaacgctccattttctgttggcatccgcctggccaggcagtggcatccaaaccacccggagccgcgatctgaggaggcctggcacctccttggagtttacgctcagatgcccgtgtgctgcttggaaagtggtcgagtcccgcgtgcagtggggagccccaggtgacagtggttatctgagacggctccacctcctgggaggaggcccacctggacctcccactcagaggagcagcacggcgtgtatggcatgacgcaggggaccaccccgcgcgctccctgaggatgtgctggctgtgccccttttttccactggcacatttggtaagagagggaagctgctccccgtcagaaccacagtgcgccgtgcgaggggcactgtcttcttcatgctccctggagcaccaccaaagaaacgtaaacaataccccacgaaagcagggtcaggggtcagggtgcgatcgagacccaggatgggggcgtccagtcatgcccaccccagcatcacaggagacatggaggtgcgggcaggctcctgaattattatgcaaattaggaggacgcaggaggggtctgccctccagccgaacaccacacactggaccctaagtggccaaatgcctgggccgcttgctggctgtggcctgaggcttgtgggttgctgcattttgcttgtagttcacaaccattttgacactggaaaatgctgactttgggggacaggatgaggccctacattctaagcccccagttggcagacaggcattgtccctgttccacatttatgtcgggacaggagatgaccttttcctccgtgtttttcctgtgtttgcacgttgaaatgaagctgacaacctggcaagacgctcagccgcttcaaaccctttttgtcaattaacttattttttaatacttgaaaagaagtaacttcgtttgtgtatctttactagaggaactgatcacctgcgcccgggtgcgggagccacagcggcatctggtgcgtcctacgcgacctggtccggggctgcccggtgctcctcacgtgcatctatttattagcctttctcttcgtatcactggcctggctggcatcagggagctgcccagaacccctgtgtgggtcctcctcacagctttctgtcccctcctccacccggtgcctgcctcaccctggcgctagaccatctggaccactcatgtgatgagggtgcatttccgttctgttttgggccaggccaacagcagagctgccactctcaccctcccagtgagaattccggctctgcagaactcgcccttgtctcagtttgggggccagggcatcaccttcctccgcacatatgttaaagaaggtttcaggatgggccctcatccacacaggccaagagggtgcaaggtgggaccctggaatcatgtggctggtgagaattccctcctcccagcctaagattcacccagacggaaacgcgagtgctgcagtggatgctgggatgcaggctggtgcctctcaagcagatcagcgactcccgcccttccttccgaaggcgacgggcacctgccttgtgccggatcttcatggggacataaagggcgagccccgaatcactagctcctatagccaaactgttcctttctcacggttccgcaccagcctggctgtgtacagctcatcaagccactgagctaatcggggtggggtgcttgtccatcaaagcagtcagcacatagcccagcgaggagccatccggaccagacccgcctgccaggggcgctccagccgcctgccgcctccgtgggctggggccagctgggagcagaggcctggcccctccaaggcgtcccgcagtggagcaggctgagtggctgtgctgaccttgggctttccatgggaaccacactgtgcttcaacttgaacattcatcccagctgcaaaggagcaaagaacctgtgtcatccttgtctgtccagaagctgccatctctctcccatgcacatccgggagataacgccgctagtggccgccacagcgctgattctccacctgttctcacgtgaggcaaaggtctccttttcttttctctttacttaaaaaaggggagaggagggtttctagattccatcttcaaaccccagtcgtcccataaaattggacgtgggaaaagaccttcactgcctgcgtggcctttcccagacctctcctcgaatgccacaaaaccggtccagccccggcagagccgccttcggcccttgtagctcctgctggccccacaacagggaaacagtttgcaaagtggcttggaaggagtgtggcctagggatctgctgtaagtggccagacgtagcaggagagcccagtgtcaccttctggtcctggtcagccttaacactgtggcatcctccacagcacacacggcagcctgcagtctggaaggtggacccgagcctttgcagagaggcgccgcagagccgcaggcctgcgccccagccttctgctcccgactgtgaggacacccagttctagtagagcactttttttaaagctcccattttgtaaccactagtttgcggttgacttgagtactctggtgacttcctgcgtcaagcgttctcaagctgtgagaatgtgcgcagctccaggcaggttttctctcggagagttaagtcttcccttgaaggcagggaagcaggatggatacacatatatcacacgcataaaacaccaggtgcgggagcagcccagactcaaggctgactaaactggaggctgaataccgtggaggtccacatgcagcttccctggagggcaggccggaggcgctcccgcccctgggcttgaggatgctgcaccccgtgggcttccaggcctgcccagatgatgccttcaggcctctgtccctggcggccatcctcaggccgattttgaccagcaatgatagactcttcttaaccctttcaaaataaatttttcagtgggacagaaaggagagttaaaaaacatttttttaaaggtggtaacatctgacccacaaagggaatgggtctgttttatgcaaaataaaagtttttcaaataaat

SEQ ID NO: 4694 - protein, 118 aa, Homosapiens
MGKKDDPKLMQEWFKLVQEKNAMVRYESELMIFARELELEDRQSRLQQELRERMAVEDHLKTEEELSEEKQILNEMLEVVEQRDSLVALLEEQRLREREEDKDLEAAMLSKGFSLNWS

SEQ ID NO: 4695 - DNA, 6040 bp, Homosapiens
agccgggaaccagaggctccagcaggtcatgcacgcggcggatcctctggagatccaggctgacgtgcactggactcatatccgtgagagagaggaggaagagaggatggcgccggcctctgagtcctctgcttccggagccccattggatgagaatgacctagaggaagatgtggactcagaaccagccgagatagaaggggaggcagcagaggatggggacccaggggacactggtgctgagctggatgatgatcagcactggtctgacagcccgtcggatgctgacagagagctgcgtttgccgtgcccagctgagggggaagcagagctggagctgagggtgtcggaagatgaggagaagctgcccgcctcaccgaagcaccaagagagaggtccctcccaagccaccagccccatccggtctccccaggaatcagctcttctgttcattccagtccacagcccctcaacagaggggccccaactcccacctgtccctgccgccacccaggagaaatcacctgaggagcgccttttccctgagcctttgctccccaaagagaagcccaaagctgatgccccctcggatctgaaagctgtgcactctcccatccgatcacagccagtgaccctgccagaagctaggactcctgtctcaccagggagcccgcagccccagccacccgtggcggcctccacgcccccacccagcccactccccatctgctcccagccccagccttccaccgaggccactgtcccatcccctacccagtcccccatacgcttccagcctgccccggccaaaacatccaccccactggcccctctccctgtccaaagccaaagtgacaccaaggacagactgggcagcccccttgctgtggatgaggccctcagacggagcgacctggtggaggagttctggatgaagagtgcggagatccgccgcagcctcgggctcacacctgtggaccgcagcaaggggcccgagcccagcttccccacgcctgccttcaggccagtgtccctcaaatcctattccgttgaaaagtccccccaggatgagggactccaccttctcaagcctctgtccatccccaaaaggctgggcctgccaaagccggaaggcgagccgttgtccctgccaaccccccggtccccgtccgacagagagctacgcagcgcccaggaggagcgcagggagctgtccagcagctctggcctgggcctgcacgggagctcctccaacatgaagacactgggcagccagagcttcaacacctcggactccgccatgctcacgcccccctccagcccgcccccaccgccacccccgggcgaggagcccgccaccttgcggaggaagctcagggaggccgagcccaatgcctcggtggtcccgccgcccttgcccgccacctggatgcggcccccccgggagcctgctcagccccccagagaggaggtgcggaagtcgtttgtggagagcgtggaggagattccctttgctgatgatgtggaggacacctatgacgacaagactgaggactcaagcctgcaggagaaattcttcacgcccccgtcctgctggccgcgccccgagaagcctcgccacccgcccctggccaaggagaacgggaggctgcctgctctggaggggacgctgcagccacagaagagggggctgcccttggtgtccgcggaagccaaggagttggccgaggagcgcatgcgagccagggagaagtccgtgaagagccaggcgctgcgggacgccatggccaggcagctgagcaggatgcagcagatggagctggcctcaggcgcccccaggccccgcaaggcgtcctcagcaccctcccagggcaaggagcgccggcctgactcccccacacgccccactctcaggggctccgaggagcccaccctgaagcatgaagccaccagcgaggaggtcctctccccgccgtcggactcagggggcccagatggctctttcacttcatccgagggctccagtgggaagagcaagaagaggtcgtcactcttctccccccgcagaaacaagaaggagaagaagtccaaaggcgagggccggcccccggagaagcccagctccaacctcctagaagaagccgccgccaaacccaagtccctgtggaagtccgtcttctccgggtacaagaaggacaagaagaagaaggccgacgacaagtcctgccccagcaccccctccagcggggccacggtggactctggaaagcacagggtgcttcccgtcgtaagggcagagctgcagctccggcgccagctgagcttctccgaggactcagacctctccagcgacgatgtccttgagaagtcctcacagaagtcccggcgagagccaagaacctacacggaggaggaactgaatgccaagctgacccggcgtgtgcaaaaggcagctcggagacaggccaagcaggaggagcttaagcggctgcatcgagcccagatcatccagcggcagctgcagcaggtggaggagaggcagcggcggctggaggaaaggggcgtggctgtggagaaggcgctccggggcgaagcaggcatgggcaagaaggacgaccccaagctgatgcaggagtggttcaagctagtgcaggagaagaacgccatggtgcgctacgagtcggagctgatgatctttgcccgggagctggagctggaagaccggcagagtcgactgcagcaggagctccgggaacgcatggcagtggaagatcaccttaagactgaggaggagctgtcagaagagaagcagattctcaatgagatgctggaggtggtggagcagagagactcactggtggcgctgctggaggagcagcggctccgggagagagaggaggacaaggacctggaggctgccatgctgtccaagggcttcagccttaactggtcctgagctcccacccaacgctccattttctgttggcatccgcctggccaggcagtggcatccaaaccacccggagccgcgatctgaggaggcctggcacctccttggagtttacgctcagatgcccgtgtgctgcttggaaagtggtcgagtcccgcgtgcagtggggagccccaggtgacagtggttatctgagacggctccacctcctgggaggaggcccacctggacctcccactcagaggagcagcacggcgtgtatggcatgacgcaggggaccaccccgcgcgctccctgaggatgtgctggctgtgccccttttttccactggcacatttggtaagagagggaagctgctccccgtcagaaccacagtgcgccgtgcgaggggcactgtcttcttcatgctccctggagcaccaccaaagaaacgtaaacaataccccacgaaagcagggtcaggggtcagggtgcgatcgagacccaggatgggggcgtccagtcatgcccaccccagcatcacaggagacatggaggtgcgggcaggctcctgaattattatgcaaattaggaggacgcaggaggggtctgccctccagccgaacaccacacactggaccctaagtggccaaatgcctgggccgcttgctggctgtggcctgaggcttgtgggttgctgcattttgcttgtagttcacaaccattttgacactggaaaatgctgactttgggggacaggatgaggccctacattctaagcccccagttggcagacaggcattgtccctgttccacatttatgtcgggacaggagatgaccttttcctccgtgtttttcctgtgtttgcacgttgaaatgaagctgacaacctggcaagacgctcagccgcttcaaaccctttttgtcaattaacttattttttaatacttgaaaagaagtaacttcgtttgtgtatctttactagaggaactgatcacctgcgcccgggtgcgggagccacagcggcatctggtgcgtcctacgcgacctggtccggggctgcccggtgctcctcacgtgcatctatttattagcctttctcttcgtatcactggcctggctggcatcagggagctgcccagaacccctgtgtgggtcctcctcacagctttctgtcccctcctccacccggtgcctgcctcaccctggcgctagaccatctggaccactcatgtgatgagggtgcatttccgttctgttttgggccaggccaacagcagagctgccactctcaccctcccagtgagaattccggctctgcagaactcgcccttgtctcagtttgggggccagggcatcaccttcctccgcacatatgttaaagaaggtttcaggatgggccctcatccacacaggccaagagggtgcaaggtgggaccctggaatcatgtggctggtgagaattccctcctcccagcctaagattcacccagacggaaacgcgagtgctgcagtggatgctgggatgcaggctggtgcctctcaagcagatcagcgactcccgcccttccttccgaaggcgacgggcacctgccttgtgccggatcttcatggggacataaagggcgagccccgaatcactagctcctatagccaaactgttcctttctcacggttccgcaccagcctggctgtgtacagctcatcaagccactgagctaatcggggtggggtgcttgtccatcaaagcagtcagcacatagcccagcgaggagccatccggaccagacccgcctgccaggggcgctccagccgcctgccgcctccgtgggctggggccagctgggagcagaggcctggcccctccaaggcgtcccgcagtggagcaggctgagtggctgtgctgaccttgggctttccatgggaaccacactgtgcttcaacttgaacattcatcccagctgcaaaggagcaaagaacctgtgtcatccttgtctgtccagaagctgccatctctctcccatgcacatccgggagataacgccgctagtggccgccacagcgctgattctccacctgttctcacgtgaggcaaaggtctccttttcttttctctttacttaaaaaaggggagaggagggtttctagattccatcttcaaaccccagtcgtcccataaaattggacgtgggaaaagaccttcactgcctgcgtggcctttcccagacctctcctcgaatgccacaaaaccggtccagccccggcagagccgccttcggcccttgtagctcctgctggccccacaacagggaaacagtttgcaaagtggcttggaaggagtgtggcctagggatctgctgtaagtggccagacgtagcaggagagcccagtgtcaccttctggtcctggtcagccttaacactgtggcatcctccacagcacacacggcagcctgcagtctggaaggtggacccgagcctttgcagagaggcgccgcagagccgcaggcctgcgccccagccttctgctcccgactgtgaggacacccagttctagtagagcactttttttaaagctcccattttgtaaccactagtttgcggttgacttgagtactctggtgacttcctgcgtcaagcgttctcaagctgtgagaatgtgcgcagctccaggcaggttttctctcggagagttaagtcttcccttgaaggcagggaagcaggatggatacacatatatcacacgcataaaacaccaggtgcgggagcagcccagactcaaggctgactaaactggaggctgaataccgtggaggtccacatgcagcttccctggagggcaggccggaggcgctcccgcccctgggcttgaggatgctgcaccccgtgggcttccaggcctgcccagatgatgccttcaggcctctgtccctggcggccatcctcaggccgattttgaccagcaatgatagactcttcttaaccctttcaaaataaatttttcagtgggacagaaaggagagttaaaaaacatttttttaaaggtggtaacatctgacccacaaagggaatgggtctgttttatgcaaaataaaagtttttcaaataaat

SEQ ID NO: 4696 - protein, 975 aa, Homosapiens
MHAADPLEIQADVHWTHIREREEEERMAPASESSASGAPLDENDLEEDVDSEPAEIEGEAAEDGDPGDTGAELDDDQHWSDSPSDADRELRLPCPAEGEAELELRVSEDEEKLPASPKHQERGPSQATSPIRSPQESALLFIPVHSPSTEGPQLPPVPAATQEKSPEERLFPEPLLPKEKPKADAPSDLKAVHSPIRSQPVTLPEARTPVSPGSPQPQPPVAASTPPPSPLPICSQPQPSTEATVPSPTQSPIRFQPAPAKTSTPLAPLPVQSQSDTKDRLGSPLAVDEALRRSDLVEEFWMKSAEIRRSLGLTPVDRSKGPEPSFPTPAFRPVSLKSYSVEKSPQDEGLHLLKPLSIPKRLGLPKPEGEPLSLPTPRSPSDRELRSAQEERRELSSSSGLGLHGSSSNMKTLGSQSFNTSDSAMLTPPSSPPPPPPPGEEPATLRRKLREAEPNASVVPPPLPATWMRPPREPAQPPREEVRKSFVESVEEIPFADDVEDTYDDKTEDSSLQEKFFTPPSCWPRPEKPRHPPLAKENGRLPALEGTLQPQKRGLPLVSAEAKELAEERMRAREKSVKSQALRDAMARQLSRMQQMELASGAPRPRKASSAPSQGKERRPDSPTRPTLRGSEEPTLKHEATSEEVLSPPSDSGGPDGSFTSSEGSSGKSKKRSSLFSPRRNKKEKKSKGEGRPPEKPSSNLLEEAAAKPKSLWKSVFSGYKKDKKKKADDKSCPSTPSSGATVDSGKHRVLPVVRAELQLRRQLSFSEDSDLSSDDVLEKSSQKSRREPRTYTEEELNAKLTRRVQKAARRQAKQEELKRLHRAQIIQRQLQQVEERQRRLEERGVAVEKALRGEAGMGKKDDPKLMQEWFKLVQEKNAMVRYESELMIFARELELEDRQSRLQQELRERMAVEDHLKTEEELSEEKQILNEMLEVVEQRDSLVALLEEQRLREREEDKDLEAAMLSKGFSLNWS

SEQ ID NO: 4697 - DNA, 1162 bp, Homosapiens
gccgcctgccgcctccgtgggctggggccagctgggagcagaggcctggcccctccaaggcgtcccgcagtggagcaggctgagtggctgtgctgaccttgggctttccatgggaaccacactgtgcttcaacttgaacattcatcccagctgcaaaggagcaaagaacctgtgtcatccttgtctgtccagaagctgccatctctctcccatgcacatccgggagataacgccgctagtggccgccacagcgctgattctccacctgttctcacgtgaggcaaaggtctccttttcttttctctttacttaaaaaaggggagaggagggtttctagattccatcttcaaaccccagtcgtcccataaaattggacgtgggaaaagaccttcactgcctgcgtggcctttcccagacctctcctcgaatgccacaaaaccggtccagccccggcagagccgccttcggcccttgtagctcctgctggccccacaacagggaaacagtttgcaaagtggcttggaaggagtgtggcctagggatctgctgtaagtggccagacgtagcaggagagcccagtgtcaccttctggtcctggtcagccttaacactgtggcatcctccacagcacacacggcagcctgcagtctggaaggtggacccgagcctttgcagagaggcgccgcagagccgcaggcctgcgccccagccttctgctcccgactgtgaggacacccagttctagtagagcactttttttaaagctcccattttgtaaccactagtttgcggttgacttgagtactctggtgacttcctgcgtcaagcgttctcaagctgtgagaatgtgcgcagctccaggcaggttttctctcggagagttaagtcttcccttgaaggcagggaagcaggatggatacacatatatcacacgccccgtgggcttccaggcctgcccagatgatgccttcaggcctctgtccctggcggccatcctcaggccgattttgaccagcaatgatagactcttcttaaccctttcaaaataaatttttcagtgggacagaaaggagagttaaaaaacatttttttaaaggtggtaacatctgacccacaaagggaatgggtctgttttatgcaaaataaaagtttttcaaataaa

SEQ ID NO: 4698 - protein, 67 aa, Homosapiens
MCAAPGRFSLGELSLPLKAGKQDGYTYITRPVGFQACPDDAFRPLSLAAILRPILTSNDRLFLTLSK

SEQ ID NO: 4699 - DNA, 825 bp, Homosapiens
cgaaagcagggtcaggggtcagggtgcgatcgagacccaggatgggggcgtccagtcatgcccaccccagcatcacaggagacatggaggtgcgggcaggctcctgaattattatgcaaattaggaggacgcaggaggggtctgccctccagccgaacaccacacactggaccctaagtggccaaatgcctgggccgcttgctggctgtggcctgaggcttgtgggttgctgcattttgcttgtagttcacaaccattttgacactggaaaatgctgactttgggggacaggatgaggccctacattctaagcccccagttggcagacaggcattgtccctgttccacatttatgtcgggacaggagatgaccttttcctccgtgtttttcctgtgtttgcacgttgaaatgaagctgacaacctggcaagacgctcagccgcttcaaaccctttttgtcaattaacttattttttaatacttgaaaagaagtaacttcgtttgtgtatctttactagaggaactgatcacctgcgcccgggtgcgggagccacagcggcatctggtgcgtcctacgcgacctggtccggggctgcccggtgctcctcacgtgcatctatttattagcctttctcttcgtatcactggcctggctggcatcaggccgattttgaccagcaatgatagactcttcttaaccctttcaaaataaatttttcagtgggacagaaaggagagttaaaaaacatttttttaaaggtggtaacatctgacccacaaagggaatgggtctgttttatgcaaaataaaagtttttcaaataaa

SEQ ID NO: 4700 - protein, 64 aa, Homosapiens [sequence omitted]

SEQ ID NO: 4701 - DNA, 1228 bp, Homosapiens
gcctcgccacccgcccctggccaaggagaacgggaggctgcctgctctggaggggacgctgcagccacagaagagggggctgcccttggtgtccgcggaagccaaggagttggccgaggagcgcatgcgagccagggagaagtccgtgaagagccaggcgctgcgggacgccatggccaggcagctgagcaggatgcagcagatggagctggcctcaggcgcccccaggccccgcaaggcgtcctcagcaccctcccagggcaaggagcgccggcctgactcccccacacgccccactctcaggggctccgaggagcccaccctgaagcatgaagccaccagcgaggaggtcctctccccgccgtcggactcagggggcccagatggctctttcacttcatccgagggctccagtgggaagagcaagaagaggtcgtcactcttctccccccgcagaaacaagaaggagaagaagtccaaaggcgagggccggcccccggagaagcccagctccaacctcctagaagaagccgccgccaaacccaagtccctgtggaagtccgtcttctccgggtacaagaaggacaagaagaagaaggccgacgacaagtcctgccccagcaccccctccagcggggccacggtggactctggaaagcacagggtgcttcccgtcgtaagggcagagctgcagctccggcgccagctgagcttctccgaggactcagacctctccagcgacgatgtccttgagaagtcctcacagaagtcccggcgagagtcaatttatgtaccacacgccttggcattcaggagatcatgtgcatcaaagccaagaacctacacggaggaggaactgaatgccaagctgacccggcgtgtgcaaaaggcagctcggagacaggccaagcaggaggagcttaagcggctgcatcgagcccagatcatccagcggcagctgcagcaggtggaggagaggcagcggcggctggaggaaaggggcgtggctgtggagaaggcgctccggggcgaagcagactattggggagagtcttattacagtgacctcatcgacttgcatctgggtggcatgggcaagaaggacgaccccaagctgatgcaggagtggttcaagctagtgcaggagaagaacgccatggtgcgctacgagtcggagctgatgatctttgcccgggagctggagctggaagaccggcagagtcgactg

SEQ ID NO: 4702 - protein, 367 aa, Homosapiens
MRAREKSVKSQALRDAMARQLSRMQQMELASGAPRPRKASSAPSQGKERRPDSPTRPTLRGSEEPTLKHEATSEEVLSPPSDSGGPDGSFTSSEGSSGKSKKRSSLFSPRRNKKEKKSKGEGRPPEKPSSNLLEEAAAKPKSLWKSVFSGYKKDKKKKADDKSCPSTPSSGATVDSGKHRVLPVVRAELQLRRQLSFSEDSDLSSDDVLEKSSQKSRRESIYVPHALAFRRSCASKPRTYTEEELNAKLTRRVQKAARRQAKQEELKRLHRAQIIQRQLQQVEERQRRLEERGVAVEKALRGEADYWGESYYSDLIDLHLGGMGKKDDPKLMQEWFKLVQEKNAMVRYESELMIFARELELEDRQSR

SEQ ID NO: 4703 - DNA, 669 bp, Homosapiens
ttttttttttttttttttgagacagagtctccctctgtcacccaggctggagtgcagtggcgcgatctcggctcactgcaagctccgcctcccgggttcacgtcattctcctgcctcagtttacggagtggggccaccgtagattttccactctgccttgctcaggttatgcagcctgggaagtgtgagggaagactgaccaaatgtgttgctgactaagaaggcactcggctattctgagtccccaacccaggaagcctatttggtgggcaccaccaatgccatgctcctggcctggggcagccttggcactgcaaggctgaggtccagtctaaaacctcgggcgatgacaaacaccatggccctgacaggggtcccagctggctggtgtgcaatactgcagacatgcaagcagctgtcatgacagggtgaggctggtccggcaggcccagtctagcatacacatagtggggctgggagacacctggtgctacacagacttaatgcagagataaagctccaggttgggaggaaaagtgaaggcaaaaaaccaaacaaatgcatgtaagaattacaatctaaaacacacaaacacacacacacacgcgcgctgggaaacctcactctaaaacacacacacacacacacacacacacacacacacgcgtt

SEQ ID NO: 4704 - protein, 46 aa, Homosapiens
MLLAWGSLGTARLRSSLKPRAMTNTMALTGVPAGWCAILQTCKQLS

SEQ ID NO: 4705 - DNA, 449 bp, Homosapiens
gagacagagtctccctctgtcacccaggctggagtgcagtggcgcgatctcggctcactgcaagctccgcctcccgggttcacgtcattctcctgcctcagcctcctgagtagctgggactacagggtgaggctggtccggcaggcccagtctagcatacacatagtggggctgggagacacctggtgctacacagacttaatgcagagataaagctccaggttgggaggaaaagtgaaggcaaaaaaccaaacaaatgcatgtaagaattacaatctaaaacacacaaacacacacacacacgcgcgctgggaaacctcactctaaaacacacacacacacacacacacacacacacacacgcgttgggaaacctcgcaggttccaaagttcctaagcaaagcagaaccaagctgatggtggactggtcaggcaaaccaagaacctat

SEQ ID NO: 4706 - protein, 38 aa, Homosapiens
NTQTHTHTRAGKPHSKTHTHTHTHTHTRVGKPRRFQSS

SEQ ID NO: 4707 - DNA, 741 bp, Homosapiens
ggaggaggaggaggaagaatatgaagaggaggaggaggaggactatgacgaggaggaggaagagtccagtgaagtgcccgaccttccctccatacgccacgcggcggtgcaggcctggctggagacggtctccggagccccattggatgagaatgacctagaggaagatgtggactcagaaccagccgagatagaaggggaggcagcagaggatggggacccaggggacactggtgctgagctggatgatgatcagcactggtctgacagcccgtcggatgctgacagagagctgcgtttgccgtgcccagctgagggggaagcagagctggagctgagggtgtcggaagatgaggagaagctgcccgcctcaccgaagcaccaagagagaggtccctcccaagccaccagccccatccggtctccccaggaatcagctcttctgttcattccagtccacagcccctcaacagaggggccccaactcccacctgtccctgccgccacccaggagaaatcacctgaggagcgccttttccctgagcctttgctccccaaagagaagcccaaagctgatgccccctcggatctgaaagctgtgcactctcccatccgatcacagccagtgaccctgccagaagctaggactcctgtctcaccagggagcccgcagccccagccacccgtggcggcctccacgcccccacccagcccactccccatctgctcccagccccagcc

SEQ ID NO: 4708 - protein, 80 aa, Homosapiens
MRRSCPPHRSTKREVPPKPPAPSGLPRNQLFCSFQSTAPQQRGPNSHLSLPPPRRNHLRSAFSLSLCSPKRSPKLMPPRI

SEQ ID NO: 4709 - DNA, 406 bp, Homosapiens
caggagggtgctcttggccgggcccctcaggagcgggggtggtctggtaggcaggtctgtccctgcgtaagaagggcctccaggcctgcacctgagcagctgtgttgcaaatgagcaagtggcgcggctgctctcaggtggaaaaggagttggcctcacttagggtgtgcacccacttctgccccttccctctgccagatcagcactggtctgacagcccgtcggatgctgacagagagctgcgtttgccgtgcccagctgagggggaagcagagctggagctgagggtgtcggaagatgaggagaagctgcccgcctcaccgaagcaccaagagagaggtccctcccaagccaccagccccatccggtctccccaggaatcagctcttctgttcattccagtcca

SEQ ID NO: 4710 - protein, 97 aa, Homosapiens
MSKWRGCSQVEKELASLRVCTHFCPFPLPDQHWSDSPSDADRELRLPCPAEGEAELELRVSEDEEKLPASPKHQERGPSQATSPIRSPQESALLFIP

SEQ ID NO: 4711 - DNA, 3123 bp, Homosapiens
gggagtgctgagagtgaggcagcatggaggagaggaagcatgagaccatgaacccagctcatgtcctctttgaccggtttgtccaggccaccacctgcaagggaaccctcaaggctttccaggagctctgtgaccacctggaactaaagccaaaggactaccgctccttctatcacaagctcaagtccaagcttaactactggaaagccaaagccctctgggcaaaattggacaaacggggcagtcacaaagactacaaaaagggaaaagcgtgcactaacaccaagtgtctcatcattggggctggcccctgtggtctccgtacagccatcgacttatccttactgggggccaaggtggttgttattgagaaacgagatgccttctcccgcaacaacgtcttgcatctctggccattcaccatacatgatctacgaggtctgggtgccaagaagttctatggcaagttctgtgctggagccatcgaccatatcagtatccgtcagctccaactaatacttttgaaagtagccttgatcctaggcattgaaatccacgtcaatgtggaattccaaggacttatacagcctcctgaggaccaagagaatgaacggataggctggcgggcactggtgcaccccaagactcatcctgtgtcagagtatgaatttgaagtgatcatcggtggggatggtcggaggaacaccttggaagggtttcgtcggaaagaattccgtggcaaactggccatcgccatcacggcaaattttatcaaccgaaatacaacagcagaagctaaagtggaagagatcagtggtgtggcttttatattcaaccaaaaatttttccaggaactgagggaagccacaggtattgacttggagaacatcgtttactacaaagatgacacacactatttcgttatgacagccaaaaagcagagtttgctggacaaaggagtgatactacatgactacgccgacacagagctcctgctttcccgagaaaacgtggaccaggaggctctgctcagctatgccagggaggcggcagacttctctacccagcagcagctgccgtctctggattttgccatcaatcactatgggcagcccgatgtggccatgtttgacttcacttgtatgtatgcctccgagaacgccgccttggtgcgggagcagaacggacaccagttactagtggctctggtcggggacagcctcctagagcctttctggccaatgggaacaggaatagcccggggctttctagctgctatggactctgcctggatggtccgaagttggtctctaggaacgagccctttggaagtgctggcagagagggaaagtatttacaggttgctgcctcagaccacccctgagaatgtgagtaagaacttcagccagtacagtatcgaccctgtcactcggtatcccaatatcaacgtcaacttcctccggccaagccaggtgcgccatttatatgatactggcgaaacaaaagatattcacctggaaatggagagcctggtgaattcccgaaccacccccaaattgactcgcaatgagtctgtagctcgttcaagcaaactgctgggttggtgccagaggcagacagatggctatgcaggggtaaacgtgacagatctcaccatgtcctggaaaagtggcttggccctttgtgcaattatccatagataccgccctgacctgatagattttgattctttggatgagcaaaatgtggagaagaataaccaactggcctttgacattgctgagaaggaattgggcatttctcccatcatgacaggcaaagaaatggcctccgtgggggagcctgataagctgtccatggtgatgtacctgactcagttctacgagatgtttaaggactccctcccctctagcgacaccttggacctaaatgccgaggagaaagcagtcctgatagccagcaccagatcccctatctccttcctaagcaaacttggccagaccatctctcggaagcgttctcccaaggataaaaaggaaaaggacttggatggtgctgggaagaggagaaagaccagtcaatcagaggaggaggaagctcctcggggccacagaggagaaagaccgaccctggtgagcactctgacagacaggaggatggacgttgccgttgggaaccagaacaaagtgaagtacatggcgacccagctgctggccaaatttgaagagaatgcgcccgcacagtccatcggcatacggagacagctgacacaagagcgtggggccagccagccgtcctgctgcctgcctgggcaggttcgccctgcccccaccccccggtggaaacagggctccatgaagaaggagttcccgcagaacctgggaggcagcgacacatgctacttctgccagaagcgggtctacgtgatggagaggctgagtgccgagggcaagttcttccaccggagctgcttcaagtgcgagtactgcgccaccaccctgcgcctctcggcctacgcctacgacatcgaggatggtaaattctactgtaagccacactactgctatcgactctctggctacgcacaaaggaagagaccggcagtggctcccctgtctggaaaggaggccaaaggacccctgcaggatggcgccaccacagatgcaaacggacgggccaacgccgtggccagctccactgagagaaccccaggttcaggcgtgaacggcctggaggagcccagcatcgccaagcgactgaggggcaccccagagcggatcgagctggagaactaccgcctgtccctgaggcaggctgaggcactgcaggaggtaccggaggagactcaggccgagcacaacctgagcagcgtgctggacacgggcgccgaggaggacgtcgccagcagagactgggtctccccatggttgcccaggatggtctcaaactcctgggctcaaatgatccacccacctcagcctcccacagtgctgggatcacagatgtgagctactgggcccagctgagcataagagtcttttctgtgtcacctttgtgttccctacagtgtctagcaagtgcgttgtgaggggaagataattgaataaattttatccaggtaaa

SEQ ID NO: 4712 - protein, 994 aa, Homosapiens
MEERKHETMNPAHVLFDRFVQATTCKGTLKAFQELCDHLELKPKDYRSFYHKLKSKLNYWKAKALWAKLDKRGSHKDYKKGKACTNTKCLIIGAGPCGLRTAIDLSLLGAKVVVIEKRDAFSRNNVLHLWPFTIHDLRGLGAKKFYGKFCAGAIDHISIRQLQLILLKVALILGIEIHVNVEFQGLIQPPEDQENERIGWRALVHPKTHPVSEYEFEVIIGGDGRRNTLEGFRRKEFRGKLAIAITANFINRNTTAEAKVEEISGVAFIFNQKFFQELREATGIDLENIVYYKDDTHYFVMTAKKQSLLDKGVILHDYADTELLLSRENVDQEALLSYAREAADFSTQQQLPSLDFAINHYGQPDVAMFDFTCMYASENAALVREQNGHQLLVALVGDSLLEPFWPMGTGIARGFLAAMDSAWMVRSWSLGTSPLEVLAERESIYRLLPQTTPENVSKNFSQYSIDPVTRYPNINVNFLRPSQVRHLYDTGETKDIHLEMESLVNSRTTPKLTRNESVARSSKLLGWCQRQTDGYAGVNVTDLTMSWKSGLALCAIIHRYRPDLIDFDSLDEQNVEKNNQLAFDIAEKELGISPIMTGKEMASVGEPDKLSMVMYLTQFYEMFKDSLPSSDTLDLNAEEKAVLIASTRSPISFLSKLGQTISRKRSPKDKKEKDLDGAGKRRKTSQSEEEEAPRGHRGERPTLVSTLTDRRMDVAVGNQNKVKYMATQLLAKFEENAPAQSIGIRRQLTQERGASQPSCCLPGQVRPAPTPRWKQGSMKKEFPQNLGGSDTCYFCQKRVYVMERLSAEGKFFHRSCFKCEYCATTLRLSAYAYDIEDGKFYCKPHYCYRLSGYAQRKRPAVAPLSGKEAKGPLQDGATTDANGRANAVASSTERTPGSGVNGLEEPSIAKRLRGTPERIELENYRLSLRQAEALQEVPEETQAEHNLSSVLDTGAEEDVASRDWVSPWLPRMVSNSWAQMIHPPQPPTVLGSQM

SEQ ID NO: 4713 - DNA, 3036 bp, Homosapiens
gggagtgctgagagtgaggcagcatggaggagaggaagcatgagaccatgaacccagctcatgtcctctttgaccggtttgtccaggccaccacctgcaagggaaccctcaaggctttccaggagctctgtgaccacctggaactaaagccaaaggactaccgctccttctatcacaagctcaagtccaagcttaactactggaaagccaaagccctctgggcaaaattggacaaacggggcagtcacaaagactacaaaaagggaaaagcgtgcactaacaccaagtgtctcatcattggggctggcccctgtggtctccgtacagccatcgacttatccttactgggggccaaggtggttgttattgagaaacgagatgccttctcccgcaacaacgtcttgcatctctggccattcaccatacatgatctacgaggtctgggtgccaagaagttctatggcaagttctgtgctggagccatcgaccatatcagtatccgtcagctccaactaatacttttgaaagtagccttgatcctaggcattgaaatccacgtcaatgtggaattccaaggacttatacagcctcctgaggaccaagagaatgaacggataggctggcgggcactggtgcaccccaagactcatcctgtgtcagagtatgaatttgaagtgatcatcggtggggatggtcggaggaacaccttggaagggtttcgtcggaaagaattccgtggcaaactggccatcgccatcacggcaaattttatcaaccgaaatacaacagcagaagctaaagtggaagagatcagtggtgtggcttttatattcaaccaaaaatttttccaggaactgagggaagccacaggtattgacttggagaacatcgtttactacaaagatgacacacactatttcgttatgacagccaaaaagcagagtttgctggacaaaggagtgatactacatgactacgccgacacagagctcctgctttcccgagaaaacgtggaccaggaggctctgctcagctatgccagggaggcggcagacttctctacccagcagcagctgccgtctctggattttgccatcaatcactatgggcagcccgatgtggccatgtttgacttcacttgtatgtatgcctccgagaacgccgccttggtgcgggagcagaacggacaccagttactagtggctctggtcggggacagcctcctagagcctttctggccaatgggaacaggaatagcccggggctttctagctgctatggactctgcctggatggtccgaagttggtctctaggaacgagccctttggaagtgctggcagagagggaaagtatttacaggttgctgcctcagaccacccctgagaatgtgagtaagaacttcagccagtacagtatcgaccctgtcactcggtatcccaatatcaacgtcaacttcctccggccaagccaggtgcgccatttatatgatactggcgaaacaaaagatattcacctggaaatggagagcctggtgaattcccgaaccacccccaaattgactcgcaatgagtctgtagctcgttcaagcaaactgctgggttggtgccagaggcagacagatggctatgcaggggtaaacgtgacagatctcaccatgtcctggaaaagtggcttggccctttgtgcaattatccatagataccgccctgacctgatagattttgattctttggatgagcaaaatgtggagaagaataaccaactggcctttgacattgctgagaaggaattgggcatttctcccatcatgacaggcaaagaaatggcctccgtgggggagcctgataagctgtccatggtgatgtacctgactcagttctacgagatgtttaaggactccctcccctctagcgacaccttggacctaaatgccgaggagaaagcagtcctgatagccagcaccagatcccctatctccttcctaagcaaacttggccagaccatctctcggaagcgttctcccaaggataaaaaggaaaaggacttggatggtgctgggaagaggagaaagaccagtcaatcagaggaggaggaagctcctcggggccacagaggagaaagaccgaccctggtgagcactctgacagacaggaggatggacgttgccgttgggaaccagaacaaagtgaagtacatggcgacccagctgctggccaaatttgaagagaatgcgcccgcacagtccatcggcatacggagacagggctccatgaagaaggagttcccgcagaacctgggaggcagcgacacatgctacttctgccagaagcgggtctacgtgatggagaggctgagtgccgagggcaagttcttccaccggagctgcttcaagtgcgagtactgcgccaccaccctgcgcctctcggcctacgcctacgacatcgaggatggtaaattctactgtaagccacactactgctatcgactctctggctacgcacaaaggaagagaccggcagtggctcccctgtctggaaaggaggccaaaggacccctgcaggatggcgccaccacagatgcaaacggacgggccaacgccgtggccagctccactgagagaaccccaggttcaggcgtgaacggcctggaggagcccagcatcgccaagcgactgaggggcaccccagagcggatcgagctggagaactaccgcctgtccctgaggcaggctgaggcactgcaggaggtaccggaggagactcaggccgagcacaacctgagcagcgtgctggacacgggcgccgaggaggacgtcgccagcagagactgggtctccccatggttgcccaggatggtctcaaactcctgggctcaaatgatccacccacctcagcctcccacagtgctgggatcacagatgtgagctactgggcccagctgagcataagagtcttttctgtgtcacctttgtgttccctacagtgtctagcaagtgcgttgtgaggggaagataattgaataaattttatccaggt

SEQ ID NO: 4714 - protein, 966 aa, Homosapiens; identical to SEQ ID NO: 668

SEQ ID NO: 4715 - DNA, 4894 bp, Homosapiens
gcttctccggctgctacctaccgcgccggacgctcgggctgcggaacagggcggcactggcccgccacagcgacgccggcgccgagggacaccgcagtatgaggcagagattaacgtgacagtgtcaggtggacccacagccatcccacctccccctctggggagtgctgagagtgaggcagcatggaggagaggaagcatgagaccatgaacccagctcatgtcctctttgaccggtttgtccaggccaccacctgcaagggaaccctcaaggctttccaggagctctgtgaccacctggaactaaagccaaaggactaccgctccttctatcacaagctcaagtccaagcttaactactggaaagccaaagccctctgggcaaaattggacaaacggggcagtcacaaagactacaaaaagggaaaagcgtgcactaacaccaagtgtctcatcattggggctggcccctgtggtctccgtacagccatcgacttatccttactgggggccaaggtggttgttattgagaaacgagatgccttctcccgcaacaacgtcttgcatctctggccattcaccatacatgatctacgaggtctgggtgccaagaagttctatggcaagttctgtgctggagccatcgaccatatcagtatccgtcagctccaactaatacttttgaaagtagccttgatcctaggcattgaaatccacgtcaatgtggaattccaaggacttatacagcctcctgaggaccaagagaatgaacggataggctggcgggcactggtgcaccccaagactcatcctgtgtcagagtatgaatttgaagtgatcatcggtggggatggtcggaggaacaccttggaagggtttcgtcggaaagaattccgtggcaaactggccatcgccatcacggcaaattttatcaaccgaaatacaacagcagaagctaaagtggaagagatcagtggtgtggcttttatattcaaccaaaaatttttccaggaactgagggaagccacaggactacgccgacacagagctcctgctttcccgagaaaacgtggaccaggaggctctgctcagctatgccagggaggcggcagacttctctacccagcagcagctgccgtctctggattttgccatcaatcactatgggcagcccgatgtggccatgtttgacttcacttgtatgtatgcctccgagaacgccgccttggtgcgggagcagaacggacaccagttactagtggctctggtcggggacagcctcctagagcctttctggccaatgggaacaggaatagcccggggctttctagctgctatggactctgcctggatggtccgaagttggtctctaggaacgagccctttggaagtgctggcagagagggaaagtatttacaggttgctgcctcagaccacccctgagaatgtgagtaagaacttcagccagtacagtatcgaccctgtcactcggtatcccaatatcaacgtcaacttcctccggccaagccaggtgcgccatttatatgatactggcgaaacaaaagatattcacctggaaatggagagcctggtgaattcccgaaccacccccaaattgactcgcaatgagtctgtagctcgttcaagcaaactgctgggttggtgccagaggcagacagatggctatgcaggggtaaacgtgacagatctcaccatgtcctggaaaagtggcttggccctttgtgcaattatccatagataccgccctgacctgatagattttgattctttggatgagcaaaatgtggagaagaataaccaactggcctttgacattgctgagaaggaattgggcatttctcccatcatgacaggcaaagaaatggcctccgtgggggagcctgataagctgtccatggtgatgtacctgactcagttctacgagatgtttaaggactccctcccctctagcgacaccttggacctaaatgccgaggagaaagcagtcctgatagccagcaccagatcccctatctccttcctaagcaaacttggccagaccatctctcggaagcgttctcccaaggataaaaaggaaaaggacttggatggtgctgggaagaggagaaagaccagtcaatcagaggaggaggaagctcctcggggccacagaggagaaagaccgaccctggtgagcactctgacagacaggaggatggacgttgccgttgggaaccagaacaaagtgaagtacatggcgacccagctgctggccaaatttgaagagaatgcgcccgcacagtccatcggcatacggagacagggctccatgaagaaggagttcccgcagaacctgggaggcagcgacacatgctacttctgccagaagcgggtctacgtgatggagaggctgagtgccgagggcaagttcttccaccggagctgcttcaagtgcgagtactgcgccaccaccctgcgcctctcggcctacgcctacgacatcgaggatggtaaattctactgtaagccacactactgctatcgactctctggctacgcacaaaggaagagaccggcagtggctcccctgtctggaaaggaggccaaaggacccctgcaggatggcgccaccacagatgcaaacggacgggccaacgccgtggccagctccactgagagaaccccaggttcaggcgtgaacggcctggaggagcccagcatcgccaagcgactgaggggcaccccagagcggatcgagctggagaactaccgcctgtccctgaggcaggctgaggcactgcaggaggtaccggaggagactcaggccgagcacaacctgagcagcgtgctggacacgggcgccgaggaggacgtcgccagcaggtcagcacgcagggctgcagggcgcccacccgccacacggccctaagagcctcctcacctctgtgtgtctcggtttcttctcagtgaagggaggcctcctgtctttcctgctgcccgcagtccattctccccagtcccttttaggttcttagcctcatcttctagtcagtgaggactcctccatcagactcaattcagagattcaggaagtatttattccttgaggacctgacatgtccccagctccaagtctgtcattgggaaggaaagtggcaggctctgcccccgggttattcacagattcagcagagggaaggacgggcacacggggagggactctgggtgattcagccaccagtgcaccgggccgtcttgagggaggcctagtccgtcccccaggcatctttttttctcctgtaggtaaagaaagggactgaaaatgtgtgccccaggggccgcatgcagcaccagtggatgcatgcttaggcagttccagagctgtaatcacatccagctgggtgacacctttggggatgtgcatgctataaccctaggactccctatatccactgccctgcaccccagggcttccagtatcagcgaaggcttcaaagtgttcagccgattacagatgatcaagagagccaagaatcaaaagggggtccggtgtcctgtggggcttcaggacagaaacacaggctgcaaacccgaggggcagaggcctcaagtggccttggagagcatttgaatcacacaccttgatttagccatgatgaagggaacatgtggggataaggagagcagagcagtttttttaaggtccaagaacgctttccagaaggtgtttgctgggccgagctgctttcagctgcacccgccacctcagccctcatgtcagacaccctctgcctagattcattcttgggctgcctcacagaccgctcctccgtgcatgccgggggcagcctctgccttggtgtctgcagttccaaagctgtcactgatggtgcatcctcatccagaactctgcttccctatccagagcacccatggaggccccactctccccactgtgcccagatgagggggagcccactctctctctccactgaccctgcagtgagggtgagagatgctgtgtgtcaaaacacatttataaacccttgagcagagctactggcttgaccttgggctgagtgtgggtcagcaccattttctccactgtaatttataaattgtgagaggcagtggggcagcaagttcatgtaatgtagcaaggacattccaggaaggctaacccctggcatttatggcaggtatgacaggagggcagcacagaaaacatgaaatcagtcagcatctatgcaatgcaatacatgcctcatcttactcagattgaagttaaaaaaagattttaaaactagcattcatgctgggcgcagtggctcatgcctgtaatcccagcactttgggaggccaaggtgggcacatcacttaaggtcaggagttcaagaccagcctggccaacataatgaaaccctgtctctactaaaaatacaaaaattagccgggcatggtggcggtcgcctgtaatcccagttactcgggaggctgaggcaggagaatcactggaacccagaaggcagaggttgcagtgagccaagatcattgtgccactgcactccagcctgggcaacagagggagacttcgtctcaaaaaaaaaaaaaaaaatgaagagcccggcctggtgcggtagctcatgcctgtaatcccagtactccgggaggccaaagcaggcagatcacctgagcccaggagtttgagagcagcagtaacatgatgaaaccccgtctctacaaaaaatatgaaaattatccggacctgcctgtaatcccaactactcaggaggctgaggcaggagaaccacttgaaccagggaggcagaagttacagtgagccaggatcatgccattgcaatccagcctgtgagacagagcaagaccctgtctc

SEQ ID NO: 4716 - protein, 581 aa, Homosapiens; identical to SEQ ID NO: 670

SEQ ID NO: 4717 - DNA, 882 bp, Homosapiens
atcttagtccggcagctcagaatcagggcaccttgcctcccggtgagctcactctgctgctagccttggtagaaaaggaacaggattatgggcagtattttatggctggcatgaaatagatacccttttctcctttgatagagatttccttctttaaatatgaaactgaagctttgaggacttaactagacttccttttgaaaagtttcagaaaagctcaggtgtggccagccaccaagccccggccttcattaagctaaattttcaactcctaacctgaaagtcggaaatgtgagtaggagccaggtagctttctcttaggcagagcaagggtttatgcgtggtcccagggcctgtctggggttgctggttagacccaggagcctcaggtggcccctttggaggaaaggagggtacctgatttcctcttggaatcagtgcaccaatgggtgttttatgggtgatgatagacccgcagctgctcagctgctgctgatgctgtagaaagggtgccccgagcctgggctgtgcgctcctgcaccatcagcctttgttcttagtgtctgtctgcttgtttagagcctctccattccgagacactaatgattctcttccaggccagcctcagtggccctctgacaggtgaaaacagaagtgtgactgtgatcgatgtttctcttccaggccagcctcagtggccctctgacaggtgaaaacagaagtgtgactgtgattgacgttttacagggtagtcatgggcactgcggcaggcaactttagtttctttccaaaaacacatctgcagctagccaagggagtatgtatatgtgattttgtgtctttaaaagaaaggcatctgaacctatttaagagaagcctttt

SEQ ID NO: 4718 - protein, 55 aa, Homosapiens
MRGPRACLGLLVRPRSLRWPLWRKGGYLISSWNQCTNGCFMGDDRPAAAQLLLML

SEQ ID NO: 4719 - DNA, 348 bp, Homosapiens
tggtgcgggagcagaacggacaccagttactagtggctctggtcggggacagcctcctagagcctttctggccaatgggaacaggaatagcccggggctttctagctgctatggactctgcctggatggtccgaagttggtctctaggaacgagccctttggaagtgctggcagagagggaaagtatttacaggttgctgcctcagaccacccctgagaatgtgagtaagaacttcagccagtacagtatcgaccctgtcactcggtatcccaatatcaacgtcaacttcctccggccaagccaggtaagaccttcttgtcagtatttacatctgggcccatctgcag

SEQ ID NO: 4720 - protein, 90 aa, Homosapiens
MGTGIARGFLAAMDSAWMVRSWSLGTSPLEVLAERESIYRLLPQTTPENVSKNFSQYSIDPVTRYPNINVNFLRPSQVRPSCQYLHLGPS

SEQ ID NO: 4721 - DNA, 569 bp, Homosapiens
cacaagctcaagtccaagcttaactactggaaagccaaagccctctgggcaaaattggacaaacggggcagtcacaaagactacaaaaagggaaaaccacaggtattgacttggagaacatcgtttactacaaagatgacacacactatttcgttatgacagccaaaaagcagagtttgctggacaaaggagtgatactacatgtgagccacggatttccttcaaaactctttcttattgaagtggttaatatcaccaagagaaagaattgtctgatgggtttttcctgcaagggaatgaaaatgagcactgaatgcatcttctggtaacccctgatgttttccagtttagcgtgaacaactcttaactatggctaatttcaaatgtaaataaaaacggggggagaatagtgtaatgaaccctcacgtacctaccgtccagctttcacagttctcaacacgtggccagtgttctgtcagtaatatttctgtgcactccttcttcaccactggattcttgcaaagcaggtttcagacagcatttcatgcataaatactcagtttaatttt

SEQ ID NO: 4722 - protein, 57 aa, Homosapiens
MTAKKQSLLDKGVILHVSHGFPSKLFLIEVVNITKRKNCLMGFSCKGMKMSTECIFW

SEQ ID NO: 4723 - DNA, 2478 bp, Homosapiens
atgacacatgtacacagaaaaatacaagaaaacacatacatcaaaatggtaacaatgatatgctggtgaacgtaatgggtatttttattttttgtactttatttaaaaaattcttttacaatgaacatgtattacttttgaactcaggtgatctgcccttctcgacctcccaaactgctgagattagaggcatgagccaccgtcaccagcccagaaaatattttttaaattgaaaataagatagcatattccacaaatcttctaccggctccattgcggattgaattagatgattctccctattgtttactaagtgtccagttatttctgggcactctccacctccgcaggacactgcccatctccccaacccagggccatttctcaacctagtgctccttctcctactaggggggcagacttcccaacgtgagcacctacatttcgccgtagatgggatccacttgcactctctgaggttctcaggcagattccttccttacggaagggggtctgatatttaatcaccccatgcactaagtacacacttcatgtgcggatccatcaggataaccccacacaagctgccagttctttgcttgtagtgggtgcccaataaatgtttgaatgcataaagaaagcactcagataagcagagacattttagagctctctggggatgagaaaagagagagctatgggagtgagaattaacttgattgactatggctggacctggcaaagaacaactcagaagtattggcctcacaatcaccttgttcaggctgcttaatcaatattaaaagtttgctgctcccacacaattttgctaggctctccaaccctgtgaggatgtcaacagttgaaaaagaagaaataatgagcccagcctgtatttgcaggggagtgttaaaactgccggtggagcaggatagtttgctaaacagccagttgagaactttcccaaactggtcggcagcagcattgcacacagaagtcccttcttcattgacatggggctaattctagccaccagcactccagcggtacggggcagttttgtggccttttgctattgaatctgccagatgtgtccaagacacactctcatgggcagaatataaacaacaaaccagtataaagaagtccacagtgatctcacccttcatagaagtcttctttgacttgttttctggccccctgtaagcactccttgtaccacactccctaaaccctgtggcttaggttttgctattttgtatttgtttcctccttctctggttgttacatgtaaaaaggttgtgttcacgcagggggcaggaattgcaatggaaagaatgcagtgtggaaagccaggctcagttacttaccagccttgctaccttagccaaacggtcatgctctctgagctgtagtttccttcctcatctgtgaatagacttctaccaactctcctcacatgactgttttgagactgaaatgatattataggtatagaaataaatgtaaacataatataaatgtatgaggcctggcgtagtggctcacgcctgtaaccccagcactttaggaagtcgaggcaggtggatcacctgaggtcaggagttcgagaccagcctggccaagatagcgaaacccccatctctactaaaaatataaaaattagccaagcgtggtggcacgagcctgtaatctcagctacttgggaggctgaggcatgagaatcgcttgaaatcaggaggcagaggttgcagtgagccgagattgcgccactgtactccagcctgggtgacagagtgtgactctgcctcaaaaaaaataaaaaaaaacaaaataaaaataaaaataaataagtaaatatatgagattatctttcatctggcatgcagtagattcttaagaaactcaagacagtattgcgttgtggagttatggtgggggcactagatgtcagacctctgtgtgcactcgggcagatcagtttcactaagctcttgtgttttcctcaggaaggcaaaacggtactaaggcgaataataaggaacatcacagaattgatatgagggtgaagttaaataatgcgggcaaagcacttcccaacagtacctagcacatagtgagcacttaataaatgtaagctgtggctgctgctgctgtggccatcagggagatagggaaatatgtcaataagaaatgtatattggccgggcacggcggctcatgcctataatcccagcactttgggaggccgaggcgggtggatcacctgaggttgggatttcaagaccagcctgaccaacatggagaaaccccgtccctactaaaaatacaaaattagctgggcgtgttggcgcatgcctgtaatcccagctactcgggaggctgaggcaggagaatcgcttgaacccaggaggcggagtttgtggtgagccgagatcatgcactccagcctgggcaacaagaacgaaactcagtctc

SEQ ID NO: 4724 - protein, 57 aa, Homosapiens [sequence omitted]

SEQ ID NO: 4725 - DNA, 2379 bp, Homosapiens
aggagggaccttgataaactagagttcatccaccagaggaggaggctgcaggccttgggcactgctcagcaggatgaggggccactgcagttgagcatgtctagcctggagtcttctgaagaacatgattattgactttatgtataggaatggctgccaatgaagaagagaatattgaaagtcagaagcatgctatcacataactctgcatttcatcgggccgagaaagcacaggttttcaggaccacagttcccatttctcctgttctgcagtcctcgtctgattggccaacactatgggcactccctgctctggtggccactggcagtgggccagggtgagggcagctcacagcccgtctcctctctgttaccttgggacgtcactcagcagttgcatcaccggctgctctctccctctgaaacatgaagcccttcctttcttattccaccttagggaagcctgggcctgcgacagaccagaagacctcacattccacagagaagacctcggtttccccccaagctctgtccagtatggagtgacaaatcgctgtacttatgagacaaaggcatgaagtccaggtcaaggcatgacttttcggcagcaacttttctagatgtgaggtatcagtaaacatttatggtgcttctgttatggatacaatacaaggatgtaaaagaaaataagtatgaggctcatcctcctgggaactcacattttcactggggctacaagacccccggagcaaatgccaggcacaagatcggggataaaagcctaactttgagaagcttgctttggctaaaaccgaaatcaattatgaagcaaaggaagtggattagagggagatcttatgaaatcccatcagatttggatcatgctactgagtttttttcttcctggctgtattttaggttttctctcccactgaaactgattaatcgttgtcaaaattcctcccttgtacccttctctctatgggagggctgtcccttggctggcctgggatgcaggaatagcttttgtgcaccctttggtgtccacttctgtgtgtctctcttggtggcactgcttccctatctctgcttgctctgaccaccttcaggctcctaggaccctaccctctcaaatttcctcctcccctgcgtccccctttcccattcaaagcccacagcacatctcagttagtgctatggaaaaaactagcctcagaaacgaatattcactgacatgtcaaggtctagtagtttgtagagccattttattggaagggacttcagaaaggaattagtttacctactcatcaggtgaggagacccacagaggggaagtcacctgcctgactcccagagacagaaacagtgctgggactaaaacccaagaagggtcctgactcccaagtcccaggaacttaattttcccccagggaatggcccaccacccacccagatgtaaaaactagagactctgggcagcattctatctctatgccagcctccagtctcctgtctattttgcctccaagatacatctctaatttgcccacttttcttgaacttcacatcaccgatctggtacaagccatcatcatctccttgcttgggcctaccaagacactaatcactgttctttttgttttgttttgtttgtttttgagacagagtctcattcttatcacccaggctggagtacagtggcatgatctcagctcactgcaacctctgcctcccatgttcaagcgattctcctgcctcagcctcccaagaagctgggattattggcatgcgccaccacaccaggctaacttcatatttttagtagagatggggtttcaccctgttggccaggctggtcttgaactcctgacctcaggtgatccacctgcctcggcctcccgaagtgctggcattacaggcatgaaccaccatggcaggctgactttcattctttctctagtattattagaatattcccaaataatattccattgtgtatatattccacattttgctcattggtttctcatggtccgatctgagctttgggtagatctggctataggcagataatccctgagacatactgctaaatgggaacagcagatgcagaacagtgtgtatgatacgctaccacttctgctggaaaacgtcaaacaggcacgtgtgcatacatatgtacgtggacttggaaaggcatagaccgtctttgagaatactcaagaagtggttatcttgggtaggagagctggtggcgggggacagaaatggaaaggagacttatttttcactggatatgcttttgtacattttatggcttattaataatgattttataattatattaccatgatcaaataaaacccttggtgaatcttc

SEQ ID NO: 4726 - protein, 60 aa, Homosapiens
MKKRILKVRSMLSHNSAFHRAEKAQVFRTTVPISPVLQSSSDWPTLWALPALVATGSGPG

SEQ ID NO: 4727 - DNA, 730 bp, Homosapiens
gagcttctgcgacggtggcgatcaggggatctgtaatgtaatgtaatgtcaaggctgacgcagagctgatcaaacattttggcaaccttagtcttgaattgattcacactttctccgcgttgcctccggagtttgctgtagggtaatgaatattgcctggtgaggatgagggacttagggtggaaaccttcacaaggaccactgagaatatgttggtcccaagggcaatgttccaaaatgaatagtgaccccaccgaggcggggttgggggcgctgagcataagggcctcatttttctcactgctctctgccccatcctgaatttgctgttaaaaaacaacgttaaatgcagacttttctgcaagagaacggaaatcccagaagatggatgtgtgcatgtctggtgacaaggaactggggagaaactaaagccaagaggatctagtacaaatgtgggaagcttggcaaagcccgggtgaaacagaatataataataagtgtgatttgtggatctgtttaaaattattattatagttacaatttaccaaatactctgttcccagtactttactataaagtgcattatgtacggtatggttttgtttttcacaatgtccttattttacattgtgtaacttgctcatggaatgactgtgtatcccctgaatagcaaacatacttagttctgtccctgcagagcagagtagagctcaatacacatctttgaacc

SEQ ID NO: 4728 - protein, 32 aa, Homosapiens
MQTFLQENGNPRRWMCACLVTRNWGETKAKRI

SEQ ID NO: 4729 - DNA, 805 bp, Homosapiens
aaccgaagctgtcttgtgaaatggaggggtcctcactaaccagttccagcggaggctaacggaagaagtgccagcaatggatgtgcagctacatgcacgcttttaattcagagcttctgcgacggtggcgatcaggggatctgtaatgtaatgtaatgtcaaggctgacgcagagctgatcaaacattttggcaaccttagtcttgaattgattcacactttctccgcgttgcctccggagtttgctgtagggtaatgaatattgcctgggtccagacttctctttcctcggagtctggtggacttggttctgcctcagcttcccatgcagacttttctgcaagagaacggaaatcccagaagatggatgtgtgcatgtctggtgacaagggcaggggatgtatgatgtgagcaggtgcctgtttaatctaatttctaggagagcaaagattctagggaagctttggagtgaattcaaagggtagagaactggggagaaactaaagccaagaggatctagtacaaatgtgggaagcttggcaaagcccgggtgaaacagaatataataataagtgtgatttgtggatctgtttaaaattattattatagttacaatttaccaaatactctgttcccagtactttactataaagtgcattatgtacggtatggttttgtttttcacaatgtccttattttacattgtgtaacttgctcatggaatgactgtgtatcccctgaatagcaaacatacttagttctgtccctgcagagcagagtagagctcaatacacatctttgaacc

SEQ ID NO: 4730 - protein, 51 aa, Homosapiens
MNIAWVQTSLSSESGGLGSASASHADFSARERKSQKMDVCMSGDKGRGCMM

SEQ ID NO: 4731 - DNA, 2355 bp, Homosapiens
attacagaaggcgatgggccgagagctgaggaactacaactcctagagtactccgcgccgccgggacgccgcgcggctgcggggctgggcgagcgcaaagatgtccgcgcccgctgccgggaggcgaggccaactcgggatatcccggagcctctggggaggcggtcactccgacgtctgaggacctgggccttggacccggactcgttatgaagagcgattcttcgacctctgcagcccccctcagggggctcgggggacccctgcgcagcagcgagccggtgcgcgcggtcccggcccgggcgccggccgtggaccttctggaggaggcggccgacctcctggtggtgcacctggacttccgggcggcgctggagacctgcgagcgggcctggcagagtctggccaaccacgccgtggcagaggaacccgcgggcacctcattggaggtgaagtgctccctgtgtgttgtggggatccaggccctggcagaaatggatcggtggcaagaagtcctctcctgggtccttcagtattaccaggtccctgaaaagctaccccccaaagtcctggagctgtgcattcttttatacagcaaaatgcaagagcctggagctgtgctggatgtggtgggtgcctggctccaagacccagccaatcaaaaccttccagaatatggagccttggcagaatttcacgtgcagcgggtgctgctgcctctgggctgcttatcggaggctgaggagctagtggtgggctctgcagcctttggtgaggagcggcgactggatgtacttcaggccattcacacagcgaggcagcagcagaaacaggaacactcaggctctgaggaggcccagaagccaaacctggaaggctctgtctcccacaagttcctgtcactaccgatgttggttcgccagctttgggactctgcggtgagccacttcttttctctgcccttcaaaaagagtctcctggctgccttgatcctctgtctcctggtggtgagatttgatccagcttccccttcctccctgcacttcctctacaagctggcccagctcttccgctggatccggaaggctgcattttctcgcctctaccagctccgcatccgtgactgagggtccctgcgcaccacacctcccgagtagctgggactacaggtgcccaccacctcgcctggctaatatttttgtatttttagtagagtctgggtttcactgtgttagccgggatggtctcgatctcctgaacttgtgatccacccacctaggcctcccaaagtgctgggattacaggtgtgagccatcgcgcccggccaacttttctttagaaaaatgagtaaagtaggtaaacttcacaggccccttagaattaaatccttagggcatggttcaagtctgtaggaagcaaatctatacttttttatatgggcttttaagtaaagcttagaaccctggggggagaaaagcagtcaggtgaggtttgagattccttctatagaatgatttcttaaaatgaaaatctgggcccacttaactaccctagataaaacgcttcaatggcttcccatggctcactggataacatctaaattcttcatggaattgaaggcccctatgtgctggttttggctaagatctcccctttgatgtgggtcccctgttgattatatgtgcggccttccagctgcccaccatcacagctacagctcgctccccttggcctctgtgccttggctcgcactgttcctactgaaggcctagcacctgctcttggcctggtgagcccctccaccttccaggcttactcaaagaattctttctgcccctccctgtgtcccgggacctgtttcatatcgcttctgtggtcgtgaccccatggtcttgtaattgtgaacttctttgctgccccttcgaagctggggagtgcttgttgcagatgcatccaagaggggtaattgcgtatcaacagtggatttgctggttgtttctacagggttctgaagcatgcaacatagaacagatacctttaaatttaggggcgctaaggaaagcaggaaccagtaatcctcttctgtggtgggatgggagggtgggggagaggggtggaatggagaggaaacaggctattgttggccagccctgggtggaggtgggtgcaagcaggacagatagtgcctgggggtgggggcggagggttcgcctctaggaaggggctagaagggatgaggaaatagttcatagcttcgtgcaggtgatccctattctgcgtgtatgtgtttgcacatgagtgtttgtagaccatagaccattaaaaaatacggaattcaaaagttacaaaaagggt

SEQ ID NO: 4732 - protein, 305 aa, Homosapiens; identical to SEQ ID NO: 676

SEQ ID NO: 4733 - DNA, 3075 bp, Homosapiens
acagaaggcgatgggccgagagctgaggaactacaactcctagagtactccgcgccgccgggacgccgcgcggctgcggggctgggcgagcgcaaagatgtccgcgcccgctgccgggaggcgaggccaactcgggatatcccggagcctctggggaggcggtcactccgacgtctgaggacctgggccttggacccggactcgttatgaagagcgattcttcgacctctgcagcccccctcagggggctcgggggacccctgcgcagcagcgagccggtgcgcgcggtcccggcccgggcgccggccgtggaccttctggaggaggcggccgacctcctggtggtgcacctggacttccgggcggcgctggagacctgcgagcgggcctggcagagtctggccaaccacgccgtggcagaggaacccgcgggcacctcattggaggtgaagtgctccctgtgtgttgtggggatccaggccctggcagaaatggatcggtggcaagaagtcctctcctgggtccttcagtattaccaggtccctgaaaagctaccccccaaagtcctggagctgtgcattcttttatacagcaaaatgcaagagcctggagctgtgctggatgtggtgggtgcctggctccaagacccagccaatcaaaaccttccagaatatggagccttggcagaatttcacgtgcagcgggtgctgctgcctctgggctgcttatcggaggctgaggagctagtggtgggctctgcagcctttggtgaggagcggcgactggatgtacttcaggccattcacacagcgaggcagcagcagaaacaggaacactcaggctctgaggaggcccagaagccaaacctggaaggctctgtctcccacaagttcctgtcactaccgatgttggttcgccagctttgggactctgcggtgagccacttcttttctctgcccttcaaaaagagtctcctggctgccttgatcctctgtctcctggtggtgagatttgatccagcttccccttcctccctgcacttcctctacaagctggcccagctcttccgctggatccggaaggctgcattttctcgcctctaccagctccgcatccgtgactgagggtccctgcgcaccacagcctctctgctcctcacgtccgtggccacagaagcagagcgacagagcgacacatccacaggcgcccctggggaaatgggaccagcctaatctcgcggagtgcactgtgtcttgctgcctgggtgccctctcctttgcaccctacttcggctggtcgcggtagatgatgtggaaacaaagcaggaccagcaggcacagcacctccagaacagtgccccggatgaccagaggccccttgaaaaggaggggtttggggacagggactgtgtccatgaaacattccatcttcttggtgaaggcaaggggttggttcttcaggtcaggatgttaatggagctggaagttcagaaaaagcctggtgaagtgacccttggcctttcacttcttgagaaacatacttctttgctgggcatggtgactcacgcctgtaatcccagcactttggaaggccatcgcgcccggccaacttttctttagaaaaatgagtaaagtaggtaaacttcacaggccccttagaattaaatccttagggcatggttcaagtctgtaggaagcaaatctatacttttttatatgggcttttaagtaaagcttagaaccctggggggagaaaagcagtcaggtgaggtttgagattccttctatagaatgatttcttaaaatgaaaatctgggcccacttaactaccctagataaaacgcttcaatggcttcccatggctcactggataacatctaaattcttcatggaattgaaggcccctatgtgctggttttggctaagatctcccctttgatgtgggtcccctgttgattatatgtgcggccttccagctgcccaccatcacagctacagctcgctccccttggcctctgtgccttggctcgcactgttcctactgaaggcctagcacctgctcttggcctggtgagcccctccaccttccaggcttactcaaagaattctttctgcccctccctgtgtcccgggacctgtttcatatcgcttctgtggtcgtgaccccatggtcttgtaattgtgaacttctttgctgccccttcgaagctggggagtgcttgttgcagatgcatccaagaggggtaattgcgtatcaacagtggatttgctggttgtttctacagggttctgaagcatgcaacatagaacagatacctttaaatttaggggcgctaaggaaagcaggaaccagtaatcctcttctgtggtgggatgggagggtgggggagaggggtggaatggagaggaaacaggctattgttggccagccctgggtggaggtgggtgcaagcaggacagatagtgcctgggggtgggggcggagggttcgcctctaggaaggggctagaagggatgaggaaatagttcatagcttcgtgcaggtgatccctattctgcgtgtatgtgtttgcacatgagtgtttgtagaccatagaccattaaaaaatacggaattcaaaagttacaaaaagggtattcttggaaaagaaagttgtttttttttagtcttgctgtgttgcccaggctggacctgaactcctgggcttgagcaagtcttcccctcagcctctggagtagctgggcctacagtgtgtgctgccacacccagctaatacagtctttctactcccgctctctattccccagtttcttgcccagaggcaacccttgccagtctgtttatccctccagatacagtctctgatagtaaacttttctttctcttacacaaatgatagtagtcacatacactacacacactgtgccacgtttaaaaagaaaaaaaacaattctcggctgggcgcggtggcgcatgcctgtaatcccagcactttgggaggccaaggtgggtgaatcacctgaagtcaggagttcgagatcagcatggccaacatggtgaaaccccatctctact

SEQ ID NO: 4734 - protein, 305 aa, Homosapiens; identical to SEQ ID NO: 676

SEQ ID NO: 4735 - DNA, 1494 bp, Homosapiens
cgagagctgaggaactacaactcctagagtactccgcgccgccgggacgccgcgcggctgcggggctgggcgagcgcaaagatgtccgcgcccgctgccgggaggcgaggccaactcgggatatcccggagcctctggggaggcggtcactccgacgtctgaggacctgggccttggacccggactcgttatgaagagcgattcttcgacctctgcagcccccctcagggggctcgggggacccctgcgcagcagcgagccggtgcgcgcggtcccggcccgggcgccggccgtggaccttctggaggaggcggccgacctcctggtggtgcacctggacttccgggcggcgctggagacctgcgagcgggcctggcagagtctggccaaccacgccgtggcagaggaacccgcgggcacctcattggaggtgaagtgctccctgtgtgttgtggggatccaggccctggcagaaatggatcggtggcaagaagtcctctcctgggtccttcagtattaccaggtccctgaaaagctaccccccaaagtcctggagctgtgcattcttttatacagcaaaatgcaagagcctggagctgtgctggatgtggtgggtgcctggctccaagacccagccaatcaaaaccttccagaatatggagccttggcagaatttcacgtgcagcgggtgctgctgcctctgggctgcttatcggaggctgaggagctagtggtgggctctgcagcctttggtgaggagcggcgactggatgtacttcaggccattcacacagcgaggcagcagcagaaacaggaacactcaggctctgaggaggcccagaagccaaacctggaaggctctgtctcccacaagttcctgtcactaccgatgttggttcgccagctttgggactctgcggtgagccacttcttttctctgcccttcaaaaagagtctcctggctgccttgatcctctgtctcctggtggtgagatttgatccagcttccccttcctccctgcacttcctctacaagctggcccagctcttccgctggatccggaaggctgcattttctcgcctctaccagctccgcatccgtgactgagggtccctgcgcaccacagcctctctgctcctcacgtccgtggccacagaagcagagcgacagagcgacacatccacaggcgcccctggggaaatgggaccagcctaatctcgcggagtgcactgtgtcttgctgcctgggtgccctctcctttgcaccctacttcggctggtcgcggtagatgatgtggaaacaaagcaggaccagcaggcacagcacctccagaacagtgccccggatgaccagaggccccttgaaaaggaggggtttggggacagggactgtgtccatgaaacattccatcttcttggtgaaggcaaggggttggttcttcaggtcaggatgttaatggagctggaagttcagaaaaagcctggtgaagtgac

SEQ ID NO: 4736 - protein, 305 aa, Homosapiens; identical to SEQ ID NO: 676

SEQ ID NO: 4737 - DNA, 1685 bp, Homosapiens
ggctgcggggctgggcgagcgcaaagatgtccgcgcccgctgccgggaggcgaggtgagtctttgatcgtaaccaggagcccggagctgaggcagttcctgcacgtgtcgcggggccggagaagctagggccaggtattccagggatgcaagaatcctgcaaatctgacgtgtaaactgcttccccagcctccaggcgagcccagcttttgcctcagataggccccttccttttccttctcggggaatcgacctcgggaaggggtgtgggcaaagagatgaggactctccctcttcgcccaggccaactcgggatatcccggagcctctggggaggcggtcactccgacgtctgaggacctgggccttggacccggactcgttatgaagagcgattcttcgacctctgcagcccccctcagggggctcgggggacccctgcgcagcagcgagccggtgcgcgcggtcccggcccgggcgccggccgtggaccttctggaggaggcggccgacctcctggtggtgcacctggacttccgggcggcgctggagacctgcgagcgggcctggcagagtctggccaaccacgccgtggcagaggaacccgcgggcacctcattggaggtgaagtgctccctgtgtgttgtggggatccaggccctggcagaaatggatcggtggcaagaagtcctctcctgggtccttcagtattaccaggtccctgaaaagctaccccccaaagtcctggagctgtgcattcttttatacagcaaaatgcaagagcctggagctgtgctggatgtggtgggtgcctggctccaagacccagccaatcaaaaccttccagaatatggagccttggcagaatttcacgtgcagcgggtgctgctgcctctgggctgcttatcggaggctgaggagctagtggtgggctctgcagcctttggtgaggagcggcgactggatgtacttcaggccattcacacagcgaggcagcagcagaaacaggaacactcaggctctgaggaggcccagaagccaaacctggaaggctctgtctcccacaagttcctgtcactaccgatgttggttcgccagctttgggactctgcggtgagccacttcttttctctgcccttcaaaaagagtctcctggctgccttgatcctctgtctcctggtggtgagatttgatccagcttccccttcctccctgcacttcctctacaagctggcccagctcttccgctggatccggaaggctgcattttctcgcctctaccagctccgcatccgtgactgagggtccctgcgcaccacagcctctctgctcctcacgtccgtggccacagaagcagagcgacagagcgacacatccacaggcgcccctggggaaatgggaccagcctaatctcgcggagtgcactgtgtcttgctgcctgggtgccctctcctttgcaccctacttcggctggtcgcggtagatgatgtggaaacaaagcaggaccagcaggcacagcacctccagaacagtgccccggatgaccagaggccccttgaaaaggaggggtttggggacagggactgtgtccatgaaacattccatcttcttggtgaaggcaaggggttggttcttcaggtcaggatgttaatggagctggaagttcagaaaaagcctggtgaagtg

SEQ ID NO: 4738 - protein, 305 aa, Homosapiens; identical to SEQ ID NO: 676

SEQ ID NO: 4739 - DNA, 1064 bp, Homosapiens
gagcggcgactggatgtacttcaggccattcacacagcgaggcagcagcagaaacaggaacactcaggctctgaggaggccccttagaattaaatccttagggcatggttcaagtctgtaggaagcaaatctatacttttttatatgggcttttaagtaaagcttagaaccctggggggagaaaagcagtcaggtgaggtttgagattccttctatagaatgatttcttaaaatgaaaatctgggcccacttaactaccctagataaaacgcttcaatggcttcccatggctcactggataacatctaaattcttcatggaattgaaggcccctatgtgctggttttggctaagatctcccctttgatgtgggtcccctgttgattatatgtgcggccttccagctgcccaccatcacagctacagctcgctccccttggcctctgtgccttggctcgcactgttcctactgaaggcctagcacctgctcttggcctggtgagcccctccaccttccaggcttactcaaagaattctttctgcccctccctgtgtcccgggacctgtttcatatcgcttctgtggtcgtgaccccatggtcttgtaattgtgaacttctttgctgccccttcgaagctggggagtgcttgttgcagatgcatccaagaggggtaattgcgtatcaacagtggatttgctggttgtttctacagggttctgaagcatgcaacatagaacagatacctttaaatttaggggcgctaaggaaagcaggaaccagtaatcctcttctgtggtgggatgggagggtgggggagaggggtggaatggagaggaaacaggctattgttggccagccctgggtggaggtgggtgcaagcaggacagatagtgcctgggggtgggggcggagggttcgcctctaggaaggggctagaagggatgaggaaatagttcatagcttcgtgcaggtgatccctattctgcgtgtatgtgtttgcacatgagtgtttgtagaccatagaccattaaaaaatacggaattcaaaagttacaaaaagggt

SEQ ID NO: 4740 - protein, 35 aa, Homosapiens
MYFRPFTQRGSSRNRNTQALRRPLRIKSLGHGSSL

SEQ ID NO: 4741 - DNA, 1473 bp, Homosapiens
gagcggcgactggatgtacttcaggccattcacacagcgaggcagcagcagaaacaggaacactcaggctctgaggaggccccttagaattaaatccttagggcatggttcaagtctgtaggaagcaaatctatacttttttatatgggcttttaagtaaagcttagaaccctggggggagaaaagcagtcaggtgaggtttgagattccttctatagaatgatttcttaaaatgaaaatctgggcccacttaactaccctagataaaacgcttcaatggcttcccatggctcactggataacatctaaattcttcatggaattgaaggcccctatgtgctggttttggctaagatctcccctttgatgtgggtcccctgttgattatatgtgcggccttccagctgcccaccatcacagctacagctcgctccccttggcctctgtgccttggctcgcactgttcctactgaaggcctagcacctgctcttggcctggtgagcccctccaccttccaggcttactcaaagaattctttctgcccctccctgtgtcccgggacctgtttcatatcgcttctgtggtcgtgaccccatggtcttgtaattgtgaacttctttgctgccccttcgaagctggggagtgcttgttgcagatgcatccaagaggggtaattgcgtatcaacagtggatttgctggttgtttctacagggttctgaagcatgcaacatagaacagatacctttaaatttaggggcgctaaggaaagcaggaaccagtaatcctcttctgtggtgggatgggagggtgggggagaggggtggaatggagaggaaacaggctattgttggccagccctgggtggaggtgggtgcaagcaggacagatagtgcctgggggtgggggcggagggttcgcctctaggaaggggctagaagggatgaggaaatagttcatagcttcgtgcaggtgatccctattctgcgtgtatgtgtttgcacatgagtgtttgtagaccatagaccattaaaaaatacggaattcaaaagttacaaaaagggtattcttggaaaagaaagttgtttttttttagtcttgctgtgttgcccaggctggacctgaactcctgggcttgagcaagtcttcccctcagcctctggagtagctgggcctacagtgtgtgctgccacacccagctaatacagtctttctactcccgctctctattccccagtttcttgcccagaggcaacccttgccagtctgtttatccctccagatacagtctctgatagtaaacttttctttctcttacacaaatgatagtagtcacatacactacacacactgtgccacgtttaaaaagaaaaaaaacaattctcggctgggcgcggtggcgcatgcctgtaatcccagcactttgggaggccaaggtgggtgaatcacctgaagtcaggagttcgagatcagc

SEQ ID NO: 4742 - protein, 35 aa, Homosapiens; identical to SEQ ID NO: 4740

SEQ ID NO: 4743 - DNA, 740 bp, Homosapiens
ggactctgcggtgagccacttcttttctctgcccttcaaaaagagtctcctggctgccttgatcctctgtctcctggtggtgagatttgatccagcttccccttcctccctgcacttcctctacaagctggcccagctcttccgctggatccggaaggctgcattttctcgcctctaccagctccgcatccgtgactgagggtccctgcgcaccacagcctctctgctcctcacgtccgtggccacagaagcagagcgacagagcgacacatccacaggcgcccctggggaaatgggaccagcctaatctcgcggagtgcactgtgtcttgctgcctgggtgccctctcctttgcaccctacttcggctggtcgcggtagatgatgtggaaacaaagcaggaccagcaggcacagcacctccagaacagtgccccggatgaccagaggccccttgaaaaggaggggtttggggacagggactgtgtccatgaaacattccatcttcttggtgaaggcaaggggttggttcttcaggtcaggatgttaatggagctggaagttcagaaaaagcctggtgaagtgacccttggcctttcacttcttgagaaacatacttctttgctgggcatggtgactcacgcctgtaatcccagcactttggaagggtgaggtgggtggatcacttgtggccaggagttcaaaacctgcctggccaacatggtgaaaccccatctctact

SEQ ID NO: 4744 - protein, 55 aa, Homosapiens
MMWKQSRTSRHSTSRTVPRMTRGPLKRRGLGTGTVSMKHSIFLVKARGWFFRSGC

SEQ ID NO: 4745 - DNA, 1652 bp, Homosapiens
gtctcccagggtgggagatggcagagtgacaggtgagaggggtgggacgttcactgtagtctccctctgccctgcagcttccccttcctccctgcacttcctctacaagctggcccagctcttccgctggatccggaaggctgcattttctcgcctctaccagctccgcatccgtgactgagggtccctgcgcaccacagcctctctgctcctcacgtccgtggccacagaagcagagcgacagagcgacacatccacaggcgcccctggggaaatgggaccagcctaatctcgcggagtgcactgtgtcttgctgcctgggtgccctctcctttgcaccctacttcggctggtcgcggtagatgatgtggaaacaaagcaggaccagcaggcacagcacctccagaacagtgccccggatgaccagaggccccttgaaaaggaggggtttggggacagggactgtgtccatgaaacattccatcttcttggtgaaggcaaggggttggttcttcaggtcaggatgttaatggagctggaagttcagaaaaagcctggtgaagtgaccccacctaggcctcccaaagtgctgggattacaggtgtgagccatcgcgcccggccaacttttctttagaaaaatgagtaaagtaggtaaacttcacaggccccttagaattaaatccttagggcatggttcaagtctgtaggaagcaaatctatacttttttatatgggcttttaagtaaagcttagaaccctggggggagaaaagcagtcaggtgaggtttgagattccttctatagaatgatttcttaaaatgaaaatctgggcccacttaactaccctagataaaacgcttcaatggcttcccatggctcactggataacatctaaattcttcatggaattgaaggcccctatgtgctggttttggctaagatctcccctttgatgtgggtcccctgttgattatatgtgcggccttccagctgcccaccatcacagctacagctcgctccccttggcctctgtgccttggctcgcactgttcctactgaaggcctagcacctgctcttggcctggtgagcccctccaccttccaggcttactcaaagaattctttctgcccctccctgtgtcccgggacctgtttcatatcgcttctgtggtcgtgaccccatggtcttgtaattgtgaacttctttgctgccccttcgaagctggggagtgcttgttgcagatgcatccaagaggggtaattgcgtatcaacagtggatttgctggttgtttctacagggttctgaagcatgcaacatagaacagatacctttaaatttaggggcgctaaggaaagcaggaaccagtaatcctcttctgtggtgggatgggagggtgggggagaggggtggaatggagaggaaacaggctattgttggccagccctgggtggaggtgggtgcaagcaggacagatagtgcctgggggtgggggcggagggttcgcctctaggaaggggctagaagggatgaggaaatagttcatagcttcgtgcaggtgatccctattctgcgtgtatgtgtttgcacatgagtgtttgtagaccatagaccattaaaaaatacggaattcaaaagttacaaaaagggt

SEQ ID NO: 4746 - protein, 89 aa, Homosapiens
MHPRGVIAYQQWICWLFLQGSEACNIEQIPLNLGALRKAGTSNPLLWWDGRVGERGGMERKQAIVGQPWVEVGASRTDSAWGWGRRVRL

SEQ ID NO: 4747 - DNA, 2061 bp, Homosapiens
gtctcccagggtgggagatggcagagtgacaggtgagaggggtgggacgttcactgtagtctccctctgccctgcagcttccccttcctccctgcacttcctctacaagctggcccagctcttccgctggatccggaaggctgcattttctcgcctctaccagctccgcatccgtgactgagggtccctgcgcaccacagcctctctgctcctcacgtccgtggccacagaagcagagcgacagagcgacacatccacaggcgcccctggggaaatgggaccagcctaatctcgcggagtgcactgtgtcttgctgcctgggtgccctctcctttgcaccctacttcggctggtcgcggtagatgatgtggaaacaaagcaggaccagcaggcacagcacctccagaacagtgccccggatgaccagaggccccttgaaaaggaggggtttggggacagggactgtgtccatgaaacattccatcttcttggtgaaggcaaggggttggttcttcaggtcaggatgttaatggagctggaagttcagaaaaagcctggtgaagtgaccccacctaggcctcccaaagtgctgggattacaggtgtgagccatcgcgcccggccaacttttctttagaaaaatgagtaaagtaggtaaacttcacaggccccttagaattaaatccttagggcatggttcaagtctgtaggaagcaaatctatacttttttatatgggcttttaagtaaagcttagaaccctggggggagaaaagcagtcaggtgaggtttgagattccttctatagaatgatttcttaaaatgaaaatctgggcccacttaactaccctagataaaacgcttcaatggcttcccatggctcactggataacatctaaattcttcatggaattgaaggcccctatgtgctggttttggctaagatctcccctttgatgtgggtcccctgttgattatatgtgcggccttccagctgcccaccatcacagctacagctcgctccccttggcctctgtgccttggctcgcactgttcctactgaaggcctagcacctgctcttggcctggtgagcccctccaccttccaggcttactcaaagaattctttctgcccctccctgtgtcccgggacctgtttcatatcgcttctgtggtcgtgaccccatggtcttgtaattgtgaacttctttgctgccccttcgaagctggggagtgcttgttgcagatgcatccaagaggggtaattgcgtatcaacagtggatttgctggttgtttctacagggttctgaagcatgcaacatagaacagatacctttaaatttaggggcgctaaggaaagcaggaaccagtaatcctcttctgtggtgggatgggagggtgggggagaggggtggaatggagaggaaacaggctattgttggccagccctgggtggaggtgggtgcaagcaggacagatagtgcctgggggtgggggcggagggttcgcctctaggaaggggctagaagggatgaggaaatagttcatagcttcgtgcaggtgatccctattctgcgtgtatgtgtttgcacatgagtgtttgtagaccatagaccattaaaaaatacggaattcaaaagttacaaaaagggtattcttggaaaagaaagttgtttttttttagtcttgctgtgttgcccaggctggacctgaactcctgggcttgagcaagtcttcccctcagcctctggagtagctgggcctacagtgtgtgctgccacacccagctaatacagtctttctactcccgctctctattccccagtttcttgcccagaggcaacccttgccagtctgtttatccctccagatacagtctctgatagtaaacttttctttctcttacacaaatgatagtagtcacatacactacacacactgtgccacgtttaaaaagaaaaaaaacaattctcggctgggcgcggtggcgcatgcctgtaatcccagcactttgggaggccaaggtgggtgaatcacctgaagtcaggagttcgagatcagc

SEQ ID NO: 4748 - protein, 89 aa, Homosapiens; identical to SEQ ID NO: 4746

SEQ ID NO: 4749 - DNA, 2487 bp, Homosapiens
gggtgccctctcctttgcaccctacttcggctggtcgcggtagatgatgtggaaacaaagcaggaccagcaggcacagcacctccagaacagtgccccggatgaccagaggccccttgaaaaggaggggtttggggacagggactgtgtccatgaaacattccatcttcttggtgaaggcaaggggttggttcttcaggtcaggatgttaatggagctggaagttcagaaaaagcctggtgaagtgacccttggcctttcacttcttgagaaacatacttctttgctgggcatggtgactcacgcctgtaatcccagcactttggaagggtgaggtgggtggatcacttgtggccaggagttcaaaacctgcctggccaacatggtgaaaccccatctctactaaaaatacaaaaattagctagatgtggtgcacgcctatagtcctagctacttgggaggctgaggcaggagaatcacttgaacccgggaggcaagggttgcagtgagctgagatcgcgccattgcactcccacctgggcaacaaagagtgaaacttggtctcagaaacgaaacaaaacacaaaaacctttctcagtcccagcatatgtggagcagcctcattcttcatagctgtgtgtcattccgttgcgtgatggggtcacagagcacagacctggtgcccttttcctttttaatatgtggaaacccctccatgctttccaaagcctacaagtacagcagccccaagtttagggtgagcagcagtggtcagagctctttactattacttttgggcaaacgcaagccaggctggcaaccaccactgccgccgaggggagatacaagcaggccagttcacactctggacgttcagtttctttctacatctagaaggtggcctctgctatccacttaaagcagcccaaggaactgtcagaaagcgaaagtgatgacatgaaccgcgagtagggcacctccctgtgccgtcgtctgctttccttcctccctcccagcctccctgtgccgtcctctgctttcctccctcccagcacggaaaagccgtggggccgatggactttggcctcacatccacagatggggcctgtgggaattctactgatttactctctggcctagtcaagcaacccacccacggcctggccaaggtcggcctcaccgccctggcctagcacctttggaaactgaatacatggagtgttaaccagaaaaatgtctggcccttttgcctcgctgcctctggaaacctcagtgtttcgggctggtaggaagctacaggacagacagtgggcacggtgcctagcagcctgtcgcgcccccgcccgcctctgcattcctccagcggtggtgtacggatccagacattgtttgccacctctaggcctcttgataaaacagcaagtatttttcttgtcttaaagcaatgcatgtatattttagaaaatattaattgcatagaaggaaatacaggactcgtgatcccaccactcagaaataattactattaatacggttgattttctttcagcttttttccccctaattaattaactaattcttttttttcctgcaactcctgcttcacagactttttttttttttttaacttggcatggtggctcacacctataatcccagcactttgggaggccagagtgggaggattgcttgagcctaggagttcaaagctagcctgggcaacctagtgggaccccatttcttttttttggggggggggtgggttataaaagcccttttataaagccaattttaaacaagaaaaaaacaaaaagtttacaaaagaaaaaaagatacagaaaaagaataacttgcttcatatgtcccaaaaagagaaaaaaataaacgggacaatgccaacatgctcaacaataaagggttctttttcttacttttttaatacaaaatacaagcaaaggatacacatacttaaaacagagctcaggagcagacacgcagtcctgggaacccttcaataagagcaaagcaggagtttgttttttctttgtgcagatacatacagagactgggatatgtaaaaattaagtatcacaaaagaccatcacacgattctaccaatgcatgttgcatctataattcacgaacatggtcaacaagatcatgttcacttcaaccccatttcatttaaattaaagaaaaaaacctggccgggcgcggtggctcacgcctgtaatcccagcaccttgggaagccgaggcaggtggatcacgaggtcaggagatcgagaccatcctggctaacacggtgaaatcccatctctactaaaaaaatacaaaaaattagccgggcgtggtggcgggtgcctgtagccccagctactcgggaggctgaggcagaagaatggcgtgaacccaggaggcggagcttgcagtgagcctagatggcgccactgcactccagcctgggggacagagcaagactccgtctt

SEQ ID NO: 4750 - protein, 103 aa, Homosapiens
MWSSLILHSCVSFRCVMGSQSTDLVPFSFLICGNPSMLSKAYKYSSPKFRVSSSGQSSLLLLLGKRKPGWQPPLPPRGDTSRPVHTLDVQFLSTSRRWPLLST

SEQ ID NO: 4751 - DNA, 2756 bp, Homosapiens
aagtgagccttacagctcttatcgctgggtaaagtgatcttgcctggtgcctcttggtcttcagctcaattttccaggttgtcctggccaagtcttgctctgttacgctcagtgcctctgcccactctttccccgccagcccttccctcccgccctgcaaacttgtcccttggctgtttcaccaggttctgcctgtatccttgcctccttggtacacaccatttcaggttcttccctttctgtgtcccattgtcctagttatgttctgttgtttgtgtaatgcccaaatttttctgctcgtgtggccttgaaaagtaggccagcctcagaggctgctgagctgaaaatggaactgagtaatcaggtgagctggaagggatgtggggggcggggcagacgggagacatgggttttgaaggcagtgaacaataaaaccttagggaggtggcaccgaggccttagcatttgaggagctgaaatgtttcagtgttgttttctcaccagccacaagcatcttatgagtttctgtgcaaggaagcgtagagcactgctgtgctgtcaggatgaagaagggctttctgcaggggctggcctttctctacccagaggccaagcaggctgccctgcactgtgtccttggtgttgatgcccaaaatagagaaggtgcttgctagcttttccttggtacattttcgggggttgcaaggcaacaagttttcttttgttttgtttgtttgtttgtttgtttgtttttgagatggagtctctgtcacccaggctggaatcgcgccattgcactcccacctgggcaacaaagagtgaaacttggtctcagaaacgaaacaaaacacaaaaacctttctcagtcccagcatatgtggagcagcctcattcttcatagctgtgtgtcattccgttgcgtgatggggtcacagagcacagacctggtgcccttttcctttttaatatgtggaaacccctccatgctttccaaagcctacaagtacagcagccccaagtttagggtgagcagcagtggtcagagctctttactattacttttgggcaaacgcaagccaggctggcaaccaccactgccgccgaggggagatacaagcaggccagttcacactctggacgttcagtttctttctacatctagaaggtggcctctgctatccacttaaagcagcccaaggaactgtcagaaagcgaaagtgatgacatgaaccgcgagtagggcacctccctgtgccgtcgtctgctttccttcctccctcccagcctccctgtgccgtcctctgctttcctccctcccagcacggaaaagccgtggggccgatggactttggcctcacatccacagatggggcctgtgggaattctactgatttactctctggcctagtcaagcaacccacccacggcctggccaaggtcggcctcaccgccctggcctagcacctttggaaactgaatacatggagtgttaaccagaaaaatgtctggcccttttgcctcgctgcctctggaaacctcagtgtttcgggctggtaggaagctacaggacagacagtgggcacggtgcctagcagcctgtcgcgcccccgcccgcctctgcattcctccagcggtggtgtacggatccagacattgtttgccacctctaggcctcttgataaaacagcaagtatttttcttgtcttaaagcaatgcatgtatattttagaaaatattaattgcatagaaggaaatacaggactcgtgatcccaccactcagaaataattactattaatacggttgattttctttcagcttttttccccctaattaattaactaattcttttttttcctgcaactcctgcttcacagactttttttttttttttaacttggcatggtggctcacacctataatcccagcactttgggaggccagagtgggaggattgcttgagcctaggagttcaaagctagcctgggcaacctagtgggaccccatttcttttttttggggggggggtgggttataaaagcccttttataaagccaattttaaacaagaaaaaaacaaaaagtttacaaaagaaaaaaagatacagaaaaagaataacttgcttcatatgtcccaaaaagagaaaaaaataaacgggacaatgccaacatgctcaacaataaagggttctttttcttacttttttaatacaaaatacaagcaaaggatacacatacttaaaacagagctcaggagcagacacgcagtcctgggaacccttcaataagagcaaagcaggagtttgttttttctttgtgcagatacatacagagactgggatatgtaaaaattaagtatcacaaaagaccatcacacgattctaccaatgcatgttgcatctataattcacgaacatggtcaacaagatcatgttcacttcaaccccatttcatttaaattaaagaaaaaaacctggccgggcgcggtggctcacgcctgtaatcccagcaccttgggaagccgaggcaggtggatcacgaggtcaggagatcgagaccatcctggctaacacggtgaaatcccatctctactaaaaaaatacaaaaaattagccgggcgtggtggcgggtgcctgtagccccagctactcgggaggctgaggcagaagaatggcgtgaacccaggaggcggagcttgcagtgagcctagatggcgccactgcactccagcctgggggacagagcaagactccgtctt

SEQ ID NO: 4752 - protein, 47 aa, Homosapiens
MESLSPRLESRHCTPTWATKSETWSQKRNKTQKPFSVPAYVEQPHSS

SEQ ID NO: 4753 - DNA, 1185 bp, Homosapiens
ccaggttctgcctgtatccttgcctccttggtacacaccatttcaggttcttccctttctgtgtcccattgtcctagttatgttctgttgtttgtgtaatgcccaaatttttctgctcgtgtggccttgaaaagtaggccagcctcagaggctgctgagctgaaaatggaactgagtaatcaggtgagctggaagggatgtggggggcggggcagacgggagacatgggttttgaaggcagtgaacaataaaaccttagggaggtggcaccgaggccttagcatttgaggagctgaaatgtttcagtgttgttttctcaccagccacaagcatcttatgagtttctgtgcaaggaagcgtagagcactgctgtgctgtcaggatgaagaagggctttctgcaggggctggcctttctctacccagaggccaagcaggctgccctgcactgtgtccttggtgttgatgcccaaaatagagaaggtgcttgctagcttttccttggtacattttcgggggttgcaaggcaacaagttttcttttgttttgtttgtttgtttgtttgtttgtttttgagatggagtgggtgcaagcaggacagatagtgcctgggggtgggggcggagggttcgcctctaggaaggggctagaagggatgaggaaatagttcatagcttcgtgcaggtgatccctattctgcgtgtatgtgtttgcacatgagtgtttgtagaccatagaccattaaaaaatacggaattcaaaagttacaaaaagggtattcttggaaaagaaagttgtttttttttagtcttgctgtgttgcccaggctggacctgaactcctgggcttgagcaagtcttcccctcagcctctggagtagctgggcctacagtgtgtgctgccacacccagctaatacagtctttctactcccgctctctattccccagtttcttgcccagaggcaacccttgccagtctgtttatccctccagatacagtctctgatagtaaacttttctttctcttacacaaatgatagtagtcacatacactacacacactgtgccacgtttaaaaagaaaaaaaacaattctcggctgggcgcggtggcgcatgcctgtaatcccagcactttgggaggccaaggtgggtgaatcacctgaagtcaggagttcgagatcagc

SEQ ID NO: 4754 - protein, 55 aa, Homosapiens
MFQCCFLTSHKHLMSFCARKRRALLCCQDEEGLSAGAGLSLPRGQAGCPALCPWC

SEQ ID NO: 4755 - DNA, 1558 bp, Homosapiens
ctctgtcacccaggctggagtgcagtggcgtgatctcagctcactgcaagctccgcctcccgggttcatgccattctcctgcctcagcctcccgagtagctgggactacaggtgcccaccacctcgcctggctaatatttttgtatttttagtagagtctgggtttcactgtgttagccgggatggtctcgatctcctgaacttgtgatccacccacctaggcctcccaaagtgctgggattacaggtgtgagccatcgcgcccggccaacttttctttagaaaaatgagtaaagtaggtaaacttcacaggccccttagaattaaatccttagggcatggttcaagtctgtaggaagcaaatctatacttttttatatgggcttttaagtaaagcttagaaccctggggggagaaaagcagtcaggtgaggtttgagattccttctatagaatgatttcttaaaatgaaaatctgggcccacttaactaccctagataaaacgcttcaatggcttcccatggctcactggataacatctaaattcttcatggaattgaaggcccctatgtgctggttttggctaagatctcccctttgatgtgggtcccctgttgattatatgtgcggccttccagctgcccaccatcacagctacagctcgctccccttggcctctgtgccttggctcgcactgttcctactgaaggcctagcacctgctcttggcctggtgagcccctccaccttccaggcttactcaaagaattctttctgcccctccctgtgtcccgggacctgtttcatatcgcttctgtggtcgtgaccccatggtcttgtaattgtgaacttctttgctgccccttcgaagctggggagtgcttgttgcagatgcatccaagaggggtaattgcgtatcaacagtggatttgctggttgtttctacagggttctgaagcatgcaacatagaacagatacctttaaatttaggggcgggagggttcgcctctaggaaggggctagaagggatgaggaaatagttcatagcttcgtgcaggtgatccctattctgcgtgtatgtgtttgcacatgagtgtttgtagaccatagaccattaaaaaatacggaattcaaaagttacaaaaagggtattcttggaaaagaaagttgtttttttttagtcttgctgtgttgcccaggctggacctgaactcctgggcttgagcaagtcttcccctcagcctctggagtagctgggcctacagtgtgtgctgccacacccagctaatacagtctttctactcccgctctctattccccagtttcttgcccagaggcaacccttgccagtctgtttatccctccagatacagtctctgatagtaaacttttctttctcttacacaaatgatagtagtcacatacactacacacactgtgccacgtttaaaaagaaaaaaaacaattctcggctgggcgcggtggcgcatgcctgtaatcccagcactttgggaggccaaggtgggtgaatcacctgaagtcaggagttcgagatcagc

SEQ ID NO: 4756 - protein, 49 aa, Homosapiens
MHPRGVIAYQQWICWLFLQGSEACNIEQIPLNLGAGGFASRKGLEGMRK

SEQ ID NO: 4757 - DNA, 1557 bp, Homosapiens
ctctgtcacccaggctggagtgcagtggcgtgatctcagctcactgcaagctccgcctcccgggttcatgccattctcctgcctcagcctcccgagtagctgggactacaggtgcccaccacctcgcctggctaatatttttgtatttttagtagagtctgggtttcactgtgttagccgggatggtctcgatctcctgaacttgtgatccacccacctaggcctcccaaagtgctgggattacaggtgtgagccatcgcgcccggccaacttttctttagaaaaatgagtaaagtaggtaaacttcacaggccccttagaattaaatccttagggcatggttcaagtctgtaggaagcaaatctatacttttttatatgggcttttaagtaaagcttagaaccctggggggagaaaagcagtcaggtgaggtttgagattccttctatagaatgatttcttaaaatgaaaatctgggcccacttaactaccctagataaaacgcttcaatggcttcccatggctcactggataacatctaaattcttcatggaattgaaggcccctatgtgctggttttggctaagatctcccctttgatgtgggtcccctgttgattatatgtgcggccttccagctgcccaccatcacagctacagctcgctccccttggcctctgtgccttggctcgcactgttcctactgaaggcctagcacctgctcttggcctggtgagcccctccaccttccaggcttactcaaagaattctttctgcccctccctgtgtcccgggacctgtttcatatcgcttctgtggtcgtgaccccatggtcttgtaattgtgaacttctttgctgccccttcgaagctggggagtgcttgttgcagatgcatccaagaggggggtggaatggagaggaaacaggctattgttggccagccctgggtggaggtgggtgcaagcaggacagatagtgcctgggggtgggggcggagggttcgcctctaggaaggggctagaagggatgaggaaatagttcatagcttcgtgcaggtgatccctattctgcgtgtatgtgtttgcacatgagtgtttgtagaccatagaccattaaaaaatacggaattcaaaagttacaaaaagggtattcttggaaaagaaagttgtttttttttagtcttgctgtgttgcccaggctggacctgaactcctgggcttgagcaagtcttcccctcagcctctggagtagctgggcctacagtgtgtgctgccacacccagctaatacagtctttctactcccgctctctattccccagtttcttgcccagaggcaacccttgccagtctgtttatccctccagatacagtctctgatagtaaacttttctttctcttacacaaatgatagtagtcacatacactacacacactgtgccacgtttaaaaagaaaaaaaacaattctcggctgggcgcggtggcgcatgcctgtaatcccagcactttgggaggccaaggtgggtgaatcacctgaagtcaggagttcgagatcagc

SEQ ID NO: 4758 - protein, 49 aa, Homosapiens
MIVVTYTTHTVPRLKRKKTILGWARWRMPVIPALWEAKVGESPEVRSSR

SEQ ID NO: 4759 - DNA, 914 bp, Homosapiens
ctcccgggttcatgccattctcctgcctcagcctcccgagtagctgggactacaggtgcccaccacctcgcctggctaatatttttgtatttttagtagagtctgggtttcactgtgttagccgggatggtctcgatctcctgaacttgtgatccacccacctaggcctcccaaagtgctgggattacaggtgtgagccatcgcgcccggccaacttttctttagaaaaatgagtaaagtaggtaaacttcacaggccccttagaattaaatccttagggcatggttcaagtctgtaggaagcaaatctatacttttttatatgggcttttaagtaaagcttagaaccctggggggagaaaagcagtcaggtgaggtttgaaattctttctgcccctccctgtgtcccgggacctgtttcatatcgcttctgtggtcgtgaccccatggtcttgtaattgtgaacttctttgctgccccttcgaagctggggagtgcttgttgcagatgcatccaagaggggtaattgcgtatcaacagtggatttgctggttgtttctacagggttctgaagcatgcaacatagaacagatacctttaaatttaggggcgctaaggaaagcaggaaccagtaatcctcttctgtggtgggatgggagggtgggggagaggggtggaatggagaggaaacaggctattgttggccagccctgggtggaggtgggtgcaagcaggacagatagtgcctgggggtgggggcggagggttcgcctctaggaaggggctagaagggatgaggaaatagttcatagcttcgtgcaggtgatccctattctgcgtgtatgtgtttgcacatgagtgtttgtagaccatagaccattaaaaaatacggaattcaaaagttacaaaaagggt

SEQ ID NO: 4760 - protein, 89 aa, Homosapiens; identical to SEQ ID NO: 4746

SEQ ID NO: 4761 - DNA, 1759 bp, Homosapiens
gcgcgattcgcctggctgcattttacatttctttctccggcagctggggtcacgaaggctgctctcgccggcggtgttggaacgtggacacgtgcgctttggtaatagggcagcctcccccgcgggcgcagtccccgctgcgagcgcccccggctgctgaggcgggaccgaggacccggagatttgagccgcgggtgggcggggaggggcctttgtgacctgcccgcccctccccggcactgtgatgccggggggcagctgcgggcccggcgcgcctgtccccggcgtccccccctcccggtgtgtcacaacggcggaggcggctgtatctggagcagtcggggcgggcaggcccagctgagaggtgcgcgggcgaggacagcggcagcgatgcgggaatgcatatcagtccacgtgggccaagcgggagttcagattggcaatgcctgctgggagctcttctgcctggaacacggcatccaggcagacggcacttttgatgctcaagctagcaagatcaacgatgatgactccttcaccacctttttcagcgagactggcaatgggaagcatgtgccccgggccgtcatgatagatctggagcctactgtagtggatgaggttcgggcaggaacctaccgccagctcttccatccagagcagctgatcacaggaaaggaggatgcagccaacaactatgcccggggccactacacggtgggcaaggagagcattgacctggtgctggaccgcatacggaagctgacagatgcttgctctggcctgcagggcttcctgattttccacagttttggtgggggcactggctccggcttcacttctctgctgatggaacgcctctccctggattatggcaagaaatccaagctggagtttgccatctacccagccccccaggtctctactgcagtggtggagccctacaactccatcctgaccacccacaccacactggaacattcagattgtgctttcatggtggacaacgaagccatctatgacatctgccgcaggaaccttgacattgagcgccctacctataccaacctcaaccgcctcatcagtcagattgtgtcctcaatcactgcttctctccgctttgacggggccctcaatgtggacctcactgagttccagaccaacctggtgccctacccccgcatccacttcccgctggtcacctacgcgcccatcatctctgccgagaaagcctatcacgaacagctctctgtggccgagataaccagctcctgctttgagcccaacagccagatggtgaagtgcgacccgagacatggcaagtacatggcctgctgcatgctctaccggggcgacgtggtgcccaaggatgtgaatgtcgctattgctgccatcaagaccaagaggaccatccagtttgtagactggtgtcccacaggcttcaaggtgggcatcaactaccagcccccgaccgtggtccccgggggagacctggccaaggtgcagcgggccgtctgcatgctcagcaacaccacggccattgcggaggcctgggcccgcctcgaccacaagttcgacctcatgtacgccaagcgggcctttgtgcattggtatgtgggagaggggatggaagaaggagaattttctgaggccagggaagacttagctgccctggagaaggattatgaagaagtggggactgattcgtttgaagaagaaaatgaaggggaggaattttaaatatataccttccccttgg

SEQ ID NO: 4762 - protein, 449 aa, Homosapiens; identical to SEQ ID NO: 678

SEQ ID NO: 4763 - DNA, 2335 bp, Homosapiens
gcgcgattcgcctggctgcattttacatttctttctccggcagctggggtcacgaaggctgctctcgccggcggtgttggaacgtggacacgtgcgctttggtaatagggcagcctcccccgcgggcgcagtccccgctgcgagcgcccccggctgctgaggcgggaccgaggacccggagatttgagccgcgggtgggcggggaggggcctttgtgacctgcccgcccctccccggcactgtgatgccggggggcagctgcgggcccggcgcgcctgtccccggcgtccccccctcccggtgtgtcacaacggcggaggcggctgtatctggagcagtcggggcgggcaggcccagctgagaggtgcgcgggcgaggacagcggcagcgatgcgggaatgcatatcagtccacgtgggccaagcgggagttcagattggcaatgcctgctgggagctcttctgcctggaacacggcatccaggcagacggcacttttgatgctcaagctagcaagatcaacgatgatgactccttcaccacctttttcagcgagactggcaatgggaagcatgtgccccgggccgtcatgatagatctggagcctactgtagtggatgaggttcgggcaggaacctaccgccagctcttccatccagagcagctgatcacaggaaaggaggatgcagccaacaactatgcccggggccactacacggtgggcaaggagagcattgacctggtgctggaccgcatacggaagctgacagatgcttgctctggcctgcagggcttcctgattttccacagttttggtgggggcactggctccggcttcacttctctgctgatggaacgcctctccctggattatggcaagaaatccaagctggagtttgccatctacccagccccccaggtctctactgcagtggtggagccctacaactccatcctgaccacccacaccacactggaacattcagattgtgctttcatggtggacaacgaagccatctatgacatctgccgcaggaaccttgacattgagcgccctacctataccaacctcaaccgcctcatcagtcagattgtgtcctcaatcactgcttctctccgctttgacggggccctcaatgtggacctcactgagttccagaccaacctggtgccctacccccgcatccacttcccgctggtcacctacgcgcccatcatctctgccgagaaagcctatcacgaacagctctctgtggccgagataaccagctcctgctttgagcccaacagccagatggtgaagtgcgacccgagacatggcaagtacatggcctgctgcatgctctaccggggcgacgtggtgcccaaggatgtgaatgtcgctattgctgccatcaagaccaagaggaccatccagtttgtagactggtgtcccacaggcttcaaggtgggcatcaactaccagcccccgaccgtggtccccgggggagacctggccaaggtgcagcgggccgtctgcatgctcagcaacaccacggccattgcggaggcctgggcccgcctcgaccacaagttcgacctcatgtacgccaagcgggcctttgtgcattggtatgtgggagaggggatggaagaaggagaattttctgaggccagggaagacttagctgccctggagaaggattatgaagaagtggggactgattcgtttgaagaagaaaatgaaggggaggaattttaaatatataccttccccttggctgtgtctctttatttatgctgtgccattcaaagcacatgttcaagagaacagaacactctccccgccccagcctgattcctgccttacccaggaggagggtgcctggccccagtacccagggtggcacgactgggctaagtggacactgagcttcatcaggccctccctgggtaggagcagctttgtgtcactaaagaaagtgagggccactgtctccggcgggtgaggctgcagcccagtttcacatgcgaggaggcctaatcaggagtttcaattccagatcgggctgggtccagccccaaaacatggcctgctggctggggagtgggaacactcagagaaaggggagatctgggcctgggaagattccggggcaggggtgagcggacgttcacatgagtgggtctatagcccgctccgggcatcatctagacttagcatgcattcactcccccatcacatattccaatacacaccctgtcctaggcactgagagctggagagttggtgataagcgagacgaacacatttcctgccctcatacacacataaataaagtgaatgagatcatgtc

SEQ ID NO: 4764 - protein, 449 aa, Homosapiens; identical to SEQ ID NO: 678

SEQ ID NO: 4765 - DNA, 1690 bp, Homosapiens
ggcgtaggctgaaggagagtttctgccatgatcgccagttcttccttgggccttcttcaccagtgcaggaatcttgtggtttggaattagccccttgcttcatctttgcaaccaccctccttttttctttcctggtataaaaggtcaaccctgggaagcaacctttagagcaaagcacaaaacagctgtgtcttctttggatctaagtcctggtccagctgctatagagctggggcacctgcagcctcaacgccaactggcaatggggggctggggcctggctggcctgcaaggtgaatgttatggggatgtagggcaaaggcatgctgggggcccagactctctgacctcgttgcttccctctccccacagcgggaatgcatatcagtccacgtgggccaagcgggagttcagattggcaatgcctgctgggagctcttctgcctggaacacggcatccaggcagacggcacttttgatgctcaagctagcaagatcaacgatgatgactccttcaccacctttttcagcgagactggcaatgggaagcatgtgccccgggccgtcatgatagatctggagcctactgtagtggatgaggttcgggcaggaacctaccgccagctcttccatccagagcagctgatcacaggaaaggaggatgcagccaacaactatgcccggggccactacacggtgggcaaggagagcattgacctggtgctggaccgcatacggaagctgacagatgcttgctctggcctgcagggcttcctgattttccacagttttggtgggggcactggctccggcttcacttctctgctgatggaacgcctctccctggattatggcaagaaatccaagctggagtttgccatctacccagccccccaggtctctactgcagtggtggagccctacaactccatcctgaccacccacaccacactggaacattcagattgtgctttcatggtggacaacgaagccatctatgacatctgccgcaggaaccttgacattgagcgccctacctataccaacctcaaccgcctcatcagtcagattgtgtcctcaatcactgcttctctccgctttgacggggccctcaatgtggacctcactgagttccagaccaacctggtgccctacccccgcatccacttcccgctggtcacctacgcgcccatcatctctgccgagaaagcctatcacgaacagctctctgtggccgagataaccagctcctgctttgagcccaacagccagatggtgaagtgcgacccgagacatggcaagtacatggcctgctgcatgctctaccggggcgacgtggtgcccaaggatgtgaatgtcgctattgctgccatcaagaccaagaggaccatccagtttgtagactggtgtcccacaggcttcaaggtgggcatcaactaccagcccccgaccgtggtccccgggggagacctggccaaggtgcagcgggccgtctgcatgctcagcaacaccacggccattgcggaggcctgggcccgcctcgaccacaagttcgacctcatgtacgccaagcgggcctttgtgcattggtatgtgggagaggggatggaagaaggagaattttctgaggccagggaagacttagctgccctggagaaggattatgaagaagtggggactgattcgtttg

SEQ ID NO: 4766 - protein, 463 aa, Homosapiens
MLWGCRAKACWGPRLSDLVASLSPQRECISVHVGQAGVQIGNACWELFCLEHGIQADGTFDAQASKINDDDSFTTFFSETGNGKHVPRAVMIDLEPTVVDEVRAGTYRQLFHPEQLITGKEDAANNYARGHYTVGKESIDLVLDRIRKLTDACSGLQGFLIFHSFGGGTGSGFTSLLMERLSLDYGKKSKLEFAIYPAPQVSTAVVEPYNSILTTHTTLEHSDCAFMVDNEAIYDICRRNLDIERPTYTNLNRLISQIVSSITASLRFDGALNVDLTEFQTNLVPYPRIHFPLVTYAPIISAEKAYHEQLSVAEITSSCFEPNSQMVKCDPRHGKYMACCMLYRGDVVPKDVNVAIAAIKTKRTIQFVDWCPTGFKVGINYQPPTVVPGGDLAKVQRAVCMLSNTTAIAEAWARLDHKFDLMYAKRAFVHWYVGEGMEEGEFSEAREDLAALEKDYEEVGTDS

SEQ ID NO: 4767 - DNA, 2250 bp, Homosapiens
gagggcgaggagaagaagaaagaaaaaggagaactgaattgaattagattagcatgaaggaccttttcacgcggagactaaaagtactgcgcataacttcctgctcagaaatatatgcaaataagaagacagatcctgaaagagcaagctatgcttcctgcccttgaacattggaatacaagttcttcagctttgggactcttggaccttcgaccacagactgaaggctgcactgtcggcttccctatttttgaggttttggaacttggactggctttcttgctcctcagcttgcagacagcctaatgtgggacttcatcttgtgatcgtaggagagtacaggtcgtgctgcagttagttcattgaaaactcatttgctcttggagcagtcaggcagtgactgccttcggctttttttctgctgactaagatctcctatagagagctacaacaatgcccaaaagaaaggctgcaggtcaaggtgatatgaggcaggagccaaagagaagatctgccaggttgtctgctatgcttgtgccagttacaccagaggtgaagcctaaaagaacatcaagttcaaggaaaatgaagacaaaaagtgatatgatggaagaaaacatagatacaagtgcccaagcagttgctgaaaccaagcaagaagcagttgttgaagaagactacaatgaaaatgctaaaaatggagaagccaaaattacagaggcaccagcttctgaaaaagaaattgtggaagtaaaagaagaaaatattgaagatgccacagaaaagggaggagaaaagaaagaagcagtggcagcagaagtaaaaaatgaagaagaagatcagaaagaagatgaagaagatcaaaacgaagagaaaggggaagctggaaaagaagacaaagatgaaaaaggggaagaagatggaaaagaggataaaaatggaaatgagaaaggagaagatgcaaaagagaaagaagatggaaaaaaaggtgaagacggaaaaggaaatggagaagatggaaaagagaaaggagaagatgaaaaagaggaagaagacagaaaagaaacaggagatggaaaagagaatgaagatggaaaagagaagggagataaaaaagaggggaaagatgtaaaagtcaaagaagatgaaaaagagagagaagatggaaaagaagatgaaggtggaaatgaggaagaagctggaaaagagaaagaagatttaaaagaagaggaagaaggaaaagaggaagatgagatcaaagaagatgatggaaaaaaagaggagccacagagtattgtttaaaactgccctatgtagtttcataatttggtaacatgtaccttcatgttgtaaagttaatagagataaatatttttatcaaaaattttataaacacagcctttctttagcattgatttaatttcagaacatcttcatattgattattagccataaagtttctaacatgaaacatttatctataaattttgtgattatagtagtggaatacatagaaaaaaatatgctttcaactttgtgagtgaatttcgtgttgtgtaagttatatgtcaaatctttgaattttaattttactcttttatacatgtgataatttcataaagtgagggatcccaaaaaaagagtttcatccaacattcttgttctgcaggttgcttttataaagaaggtgaactattttcatgtaatgttaagagttaaacttatctttcccaaatataactttattattagcttgggaaaaatgaaattgtattcccatttttaaaataaatacaaatgtttatttcagaagggcagttttgattatatgtgaatacacaaattttactggatttatcttaataaaaagactctgacgatgattgtgttttgttatatcttcaaaaatatagctagtgaaatattgtgcttaatttttttctattgtgttattcatgaaaatatttaatattcactgacataaaattaatataaagtaaaattcaccattttaattataataaaaataaagtatataattcaatggttgtcagtatattcacaatgttgtgtccactgtttaattccagagaatttttatcacccaaataagaaacaaagcaccaattagcagtctcttcccattttcgcccaacttatcccccacctccatcccttggcaaccactaatctgccttctatctctatggatttgcctattctgaacatttattataaatggaatcacat

SEQ ID NO: 4768 - protein, 282 aa, Homosapiens; identical to SEQ ID NO: 680

SEQ ID NO: 4769 - DNA, 2350 bp, Homosapiens
gatttttgacgattccttccctgagaagagggcgaggagaagaagaaagaaaaaggagaactgaattgaattagattagcatgaaggaccttttcacgcggagactaaaagtactgcgcataacttcctgctcagaaatatatgcaaataagaagacagatcctgaaagagcaagcttatgacatccctttcccttctcaagtggacactgctatgctctcacccctcactcagaactaagagtctccagatgcttcctgcccttgaacattggaatacaagttcttcagctttgggactcttggaccttcgaccacagactgaaggctgcactgtcggcttccctatttttgaggttttggaacttggactggctttcttgctcctcagcttgcagacagcctaatgtgggacttcatcttgtgatcgtaggagagtacaggtcgtgctgcagttagttcattgaaaactcatttgctcttggagcagtcaggcagtgactgccttcggctttttttctgctgactaagatctcctatagagagctacaacaatgcccaaaagaaaggctgcaggtcaaggtgatatgaggcaggagccaaagagaagatctgccaggttgtctgctatgcttgtgccagttacaccagaggtgaagcctaaaagaacatcaagttcaaggaaaatgaagacaaaaagtgatatgatggaagaaaacatagatacaagtgcccaagcagttgctgaaaccaagcaagaagcagttgttgaagaagactacaatgaaaatgctaaaaatggagaagccaaaattacagaggcaccagcttctgaaaaagaaattgtggaagtaaaagaagaaaatattgaagatgccacagaaaagggaggagaaaagaaagaagcagtggcagcagaagtaaaaaatgaagaagaagatcagaaagaagatgaagaagatcaaaacgaagagaaaggggaagctggaaaagaagacaaagatgaaaaaggggaagaagatggaaaagaggataaaaatggaaatgagaaaggagaagatgcaaaagagaaagaagatggaaaaaaaggtgaagacggaaaaggaaatggagaagatggaaaagagaaaggagaagatgaaaaagaggaagaagacagaaaagaaacaggagatggaaaagagaatgaagatggaaaagagaagggagataaaaaagaggggaaagatgtaaaagtcaaagaagatgaaaaagagagagaagatggaaaagaagatgaaggtggaaatgaggaagaagctggaaaagagaaagaagatttaaaagaagaggaagaaggaaaagaggaagatgagatcaaagaagatgatggaaaaaaagaggagccacagagtattgtttaaaactgccctatgtagtttcataatttggtaacatgtaccttcatgttgtaaagttaatagagataaatatttttatcaaaaattttataaacacagcctttctttagcattgatttaatttcagaacatcttcatattgattattagccataaagtttctaacatgaaacatttatctataaattttgtgattatagtagtggaatacatagaaaaaaatatgctttcaactttgtgagtgaatttcgtgttgtgtaagttatatgtcaaatctttgaattttaattttactcttttatacatgtgataatttcataaagtgagggatcccaaaaaaagagtttcatccaacattcttgttctgcaggttgcttttataaagaaggtgaactattttcatgtaatgttaagagttaaacttatctttcccaaatataactttattattagcttgggaaaaatgaaattgtattcccatttttaaaataaatacaaatgtttatttcagaagggcagttttgattatatgtgaatacacaaattttactggatttatcttaataaaaagactctgacgatgattgtgttttgttatatcttcaaaaatatagctagtgaaatattgtgcttaatttttttctattgtgttattcatgaaaatatttaatattcactgacataaaattaatataaagtaaaattcaccattttaattataataaaaataaagtatataattcaatggttgtcagtatattcacaatgttgtgtccactgtttaattccagagaatttttatcacccaaataagaaacaaagcaccaattagcagtctcttcccattttcgcccaacttatcccccacctccatcccttggcaaccactaatctgccttctatctctatggatttgcctattctgaacatttattataaatggaatcacat

SEQ ID NO: 4770 - protein, 282 aa, Homosapiens; identical to SEQ ID NO: 680

SEQ ID NO: 4771 - DNA, 2126 bp, Homosapiens
aatagcaccgcgagatctgttgaaacattgatttttgacgattccttccctgagaagagggcgaggagaagaagaaagaaaaaggagaactgaattgaattagattagcatgaaggaccttttcacgcggagactaaaagtactgcgcataacttcctgctcagaaatatatgcaaataagaagacagatcctgaaagagcaagctaggagagtacaggtcgtgctgcagttagttcattgaaaactcatttgctcttggagcagtcaggcagtgactgccttcggctttttttctgctgactaagatctcctatagagagctacaacaatgcccaaaagaaaggctgcaggtcaaggtgatatgaggcaggagccaaagagaagatctgccaggttgtctgctatgcttgtgccagttacaccagaggtgaagcctaaaagaacatcaagttcaaggaaaatgaagacaaaaagtgatatgatggaagaaaacatagatacaagtgcccaagcagttgctgaaaccaagcaagaagcagttgttgaagaagactacaatgaaaatgctaaaaatggagaagccaaaattacagaggcaccagcttctgaaaaagaaattgtggaagtaaaagaagaaaatattgaagatgccacagaaaagggaggagaaaagaaagaagcagtggcagcagaagtaaaaaatgaagaagaagatcagaaagaagatgaagaagatcaaaacgaagagaaaggggaagctggaaaagaagacaaagatgaaaaaggggaagaagatggaaaagaggataaaaatggaaatgagaaaggagaagatgcaaaagagaaagaagatggaaaaaaaggtgaagacggaaaaggaaatggagaagatggaaaagagaaaggagaagatgaaaaagaggaagaagacagaaaagaaacaggagatggaaaagagaatgaagatggaaaagagaagggagataaaaaagaggggaaagatgtaaaagtcaaagaagatgaaaaagagagagaagatggaaaagaagatgaaggtggaaatgaggaagaagctggaaaagagaaagaagatttaaaagaagaggaagaaggaaaagaggaagatgagatcaaagaagatgatggaaaaaaagaggagccacagagtattgtttaaaactgccctatgtagtttcataatttggtaacatgtaccttcatgttgtaaagttaatagagataaatatttttatcaaaaattttataaacacagcctttctttagcattgatttaatttcagaacatcttcatattgattattagccataaagtttctaacatgaaacatttatctataaattttgtgattatagtagtggaatacatagaaaaaaatatgctttcaactttgtgagtgaatttcgtgttgtgtaagttatatgtcaaatctttgaattttaattttactcttttatacatgtgataatttcataaagtgagggatcccaaaaaaagagtttcatccaacattcttgttctgcaggttgcttttataaagaaggtgaactattttcatgtaatgttaagagttaaacttatctttcccaaatataactttattattagcttgggaaaaatgaaattgtattcccatttttaaaataaatacaaatgtttatttcagaagggcagttttgattatatgtgaatacacaaattttactggatttatcttaataaaaagactctgacgatgattgtgttttgttatatcttcaaaaatatagctagtgaaatattgtgcttaatttttttctattgtgttattcatgaaaatatttaatattcactgacataaaattaatataaagtaaaattcaccattttaattataataaaaataaagtatataattcaatggttgtcagtatattcacaatgttgtgtccactgtttaattccagagaatttttatcacccaaataagaaacaaagcaccaattagcagtctcttcccattttcgcccaacttatcccccacctccatcccttggcaaccactaatctgccttctatctctatggatttgcctattctgaacatttattataaatggaatcacat

SEQ ID NO: 4772 - protein, 282 aa, Homosapiens; identical to SEQ ID NO: 680

SEQ ID NO: 4773 - DNA, 757 bp, Homosapiens
tgccagttacaccagaggtgaagcctaaaagaacatcaagttcaagggaaaagaggaagatgagatcaaagaagatgatggaaaaaaagaggagccacagagtattgtttaaaactgccctatgtagtttcataatttggtaacatgtaccttcatgttgtaaagttaatagagataaatatttttatcaaaaattttataaacacagcctttctttagcattgatttaatttcagaacatcttcatattgattattagccataaagtttctaacatgaaacatttatctataaattttgtgattatagtagtggaatacatagaaaaaaatatgctttcaactttgtgagtgaatttcgtgttgtgtaagttatatgtcaaatctttgaattttaattttactcttttatacatgtgataatttcataaagtgagggatcccaaaaaaagagtttcatccaacattcttgttctgcaggttgcttttataaagaaggtgaactattttcatgtaatgttaagagttaaacttatctttcccaaatataactttattattagcttgggaaaaatgaaattgtattcccatttttaaaataaatacaaatgtttatttcagaagggcagttttgattatatgtgaatacacaaattttactggatttatcttaataaaaagactctgacgatgattgtgttttgttatatcttcaaaaatatagctagtgaaatattgtgcttaatttttttctattg

SEQ ID NO: 4774 - protein, 36 aa, Homosapiens
NCIPIFKINTNVYFRRAVLIICEYTNFTGFILIKRL

SEQ ID NO: 4775 - DNA, 695 bp, Homosapiens
tgccagttacaccagaggtgaagcctaaaagaacatcaagttcaagggaaaagaggaagatgagatcaaagaagatgatggaaaaaaagaggagccacagagtattgtttaaaactgccctatgtagtttcataatttggtaacatgtaccttcatgttgtaaagttaatagagataaatatttttatcaaaaattttataaacacagcctttctttagcattgatttaatttcagaacatcttcatattgattattagccataaagtttctaacatgaaacatttatctataaattttgtgattatagtagtggaatacatagaaaaaaatatgctttcaactttgtgagtgaatttcgtgttgtgtaagttatatgtcaaatctttgaattttaattttactcttttatacatgtgataatttcataaagtgagggatcccaaaaaaagagtttcatccaacattcttgttctgcaggttgcttttataaagaaggtgaactattttcatgtaatgttaagagttaaacttatctttcccaaatataactttattattagcttgggaaaaatgaaattgtattcccatttttaaaataaatacaaatgtttatttcagaagggcagttttgattatatgtgaatacacaaattttactggatttatcttaataaaaagactctgacgatgatt

SEQ ID NO: 4776 - protein, 36 aa, Homosapiens; identical to SEQ ID NO: 4774

SEQ ID NO: 4777 - DNA, 1761 bp, Homosapiens
aatagcaccgcgagatctgttgaaacattgatttttgacgattccttccctgagaagagggcgaggagaagaagaaagaaaaaggagaactgaattgaattagattagcatgaaggaccttttcacgcggagactaaaagtactgcgcataacttcctgctcagaaatatatgcaaataagaagacagatcctgaaagagcaagctaggagagtacaggtcgtgctgcagttagttcattgaaaactcatttgctcttggagcagtcaggcagtgactgccttcggctttttttctgctgactaagatctcctatagagagctacaacaatgcccaaaagaaaggctgcaggtcaaggtgatatgaggcaggagccaaagagaagatctgccaggttgtctgctatgcttgtgccagttacaccagaggtgaagcctaaaagaacatcaagttcaaggaaaatgaagacaaaaagtgatatgatggaagaaaacatagatacaagtgcccaagcagttgctgaaaccaagcaagaagcagttgttgaagaagactacaatgaaaatgctaaaaatggagaagccaaaattacagaggcaccagcttctgaaaaagaaattgtggaagtaaaagaagaaaatattgaagatgccacagaaaagggaggagaaaagaaagaagcagtggcagcagaagtaaaaaatgaagaagaagatcagaaagaagatgaagaagatcaaaacgaagagaaaggggaagctggaaaagaagacaaagatgaaaaaggggaagaagatggaaaagaggataaaaatggaaatgagaaaggagaagatgcaaaagagaaagaagatggaaaaaaaggtgaagacggaaaaggaaatggagaagatggaaaagagaaaggagaagatgaaaaagaggaagaagacagaaaagaaacaggagatggaaaagagaatgaagatggaaaagagaagggagataaaaaagaggggaaagatgtaaaagtcaaagaagatgaaaaagagagagaagatggaaaagaagatgaaggtggaaatgaggaagaagctggaaaagagaaagaagatttaaaagaagaggaagaaggaaaagaggaagatgagatcaaagaagatgatggaaaaaaagaggagccacagagtattgtttaaaactgccctatgtagtttcataatttggtaacatgtaccttcatgttgtaaagttaatagagataaatatttttatcaaaaattttataaacacagcctttctttagcattgatttaatttcagaacatcttcatattgattattagccataaagtttctaacatgaaacatttatctataaattttgtgattatagtagtggaatacatagaaaaaaatatgctttcaactttgtgagtgaatttcgtgttgtgtaagttatatgtcaaatctttgaattttaattttactcttttatacatgtgataatttcataaagtgagggatcccaaaaaaagagtttcatccaacattcttgttctgcaggttgcttttataaagaaggtgaactattttcatgtaatgttaagagttaaacttatctttcccaaatataactttattattagcttgggaaaaatgaaattgtattcccatttttaaaataaatacaaatgtttatttcagaagggcagttttgattatatgtgaatacacaaattttactggatttatcttaataaaaagactctgacgatgatt

SEQ ID NO: 4778 - protein, 282 aa, Homosapiens; identical to SEQ ID NO: 680

SEQ ID NO: 4779 - DNA, 1837 bp, Homosapiens
gagattccctattaaaaaaaaatagaattgatgcaaacagcctttctccttccaccttcccccacccttctctgccaaccgctgtttcagcccctagctggattccagccattgctgcagctgctccacagcccttttcaggacccaaacaaccgcagccgctgttcccaggatggtgatccgtgtatatattgcatcttcctctggctctacagcgattaagaagaaacaacaagatgtgcttggtttcctagaagccaacaaaataggatttgaagaaaaagatattgcagccaatgaagagaatcggaagtggatgagagaaaatgtacctgaaaatagtcgaccagccacaggttaccccctgccacctcagattttcaatgaaagccagtatcgcggggactatgatgccttctttgaagccagagaaaataatgcagtgtatgccttcttaggcttgacagccccacctggttcaaaggaagcagaagtgcaagcaaagcagcaagcatgaaccttaagcactgtgctttaagcatcctgaaaaatgagtctccattgcttttataaaatagcagaattagctttgcttcaaaagaaataggcttaatgttgaaataatagattagttgggttttcacatgcaaacattcaaaatgaatacaaaattaaaatttgaacattatggtgattatggtgaggagaatgggatattaacataaaattatattaataagtagatatcgtagaaatagtgttgttacctgccaagccatcctgtatacaccaatgattttacaaagaaaacacccttccctccttctgccattactatggcaacttaagtgtatctgcagctctacattaaaaaggagaaagagaaataacctgtctctcattcctaagttgcctcattaattttcatgaacaagaatatgtacctttttgatgctatattactgcgattaaaaagttcttgcaggtaatgtttatgatatgttaaacgttgtaatttcctatcgtaattataacattcccattcttttgtagatgaaacttctacatattgaaccacagattttctgagcttctaaatgtagcctttcattgcacatttcagtgatcagaatagatatccttttacacgcacaaaagcaatagattcattcagtggacaagttccttgtttaactacacagctatgatggaatgatatatccaagttccttgcctcagtgaaatatgcatatgtatatcatgaaagtgggatgccaagtaagcttaaaatggcattctctagcaaagagattagacttttaaataactcttataaaacaggttggcgatcatttcccaagattggtttcccttgagtttttgctaaaacaaatcttagtagttttgcccgtttaaaacaactcacaatcgtaaatgctactattcctaagatatcttacctttttatttcagtttagccatgtattgtatgagtgtattagtctaagcagtgagaatcttttctatgcctctattccagcaaaaagtagaagtatcaaataaaaagggcaacttttaaaatattaagcctgaagacttctaaaaagacaagaaacatggcctaaataaccaacatagatttacatagtaagtttcacactaccttattaccaaaagcaaacacctcttactttaaactacattatcatgtatatctattgtatgctggtctttactttttgccaaaatcaacatataatgaagagatgcctttgtttcatgagattcaaacttgatgctatgctttaaaataaactcagtacttttagaaacataa

SEQ ID NO: 4780 - protein, 114 aa, Homosapiens; identical to SEQ ID NO: 682

SEQ ID NO: 4781 - DNA, 935 bp, Homosapiens
aaacagcctgttccttccggggttttgggctggaactgcagcgcttagagagctcggtggaagctgctaaaggcggaggcggggctctggcgagttctccttccaccttcccccacccttctctgccaaccgctgtttcagcccctagctggattccagccattgctgcagctgctccacagcccttttcaggacccaaacaaccgcagccgctgttcccaggatggtgatccgtgtatatattgcatcttcctctggctctacagcgattaagaagaaacaacaagatgtgcttggtttcctagaagccaacaaaataggatttgaagaaaaagatattgcagccaatgaagagaatcggaagtggatgagagaaaatgtacctgaaaatagtcgaccagccacaggttaccccctgccacctcagattttcaatgaaagccagtatcgcggggactatgatgccttctttgaagccagagaaaataatgcagtgtatgccttcttaggcttgacagccccacctggttcaaaggaagcagaagtgcaagcaaagcagcaagcatgaaccttaagcactgtgctttaagcatcctgaaaaatgagtctccattgcttttataaaatagcagaattagctttgcttcaaaagaaataggcttaatgttgaaataatagattagttgggttttcacatgcaaacattcaaaatgaatacaaaattaaaatttgaacattatggtgattatggtgaggagaatgggatattaacataaaattatattaataagtagatatcgtagaaatagtgttgttacctgccaagccatcctgtatacaccaatgattttacaaagaaaacacccttccctccttctgccattactatggcaacttaagtgtatctgcagctctacattaaaaaggagaaagag

SEQ ID NO: 4782 - protein, 114 aa, Homosapiens; identical to SEQ ID NO: 682

SEQ ID NO: 4783 - DNA, 1888 bp, Homosapiens
aaacagcctgttccttccggggttttgggctggaactgcagcgcttagagagctcggtggaagctgctaaaggcggaggcggggctctggcgagttctccttccaccttcccccacccttctctgccaaccgctgtttcagcccctagctggattccagccattgctgcagctgctccacagcccttttcaggacccaaacaaccgcagccgctgttcccaggatggtgatccgtgtatatattgcatcttcctctggctctacagcgattaagaagaaacaacaagatgtgcttggtttcctagaagccaacaaaataggatttgaagaaaaagatattgcagccaatgaagagaatcggaagtggatgagagaaaatgtacctgaaaatagtcgaccagccacaggttaccccctgccacctcagattttcaatgaaagccagtatcgcggggactatgatgccttctttgaagccagagaaaataatgcagtgtatgccttcttaggcttgacagccccacctggttcaaaggaagcagaagtgcaagcaaagcagcaagcatgaaccttaagcactgtgctttaagcatcctgaaaaatgagtctccattgcttttataaaatagcagaattagctttgcttcaaaagaaataggcttaatgttgaaataatagattagttgggttttcacatgcaaacattcaaaatgaatacaaaattaaaatttgaacattatggtgattatggtgaggagaatgggatattaacataaaattatattaataagtagatatcgtagaaatagtgttgttacctgccaagccatcctgtatacaccaatgattttacaaagaaaacacccttccctccttctgccattactatggcaacttaagtgtatctgcagctctacattaaaaaggagaaagagaaataacctgtctctcattcctaagttgcctcattaattttcatgaacaagaatatgtacctttttgatgctatattactgcgattaaaaagttcttgcaggtaatgtttatgatatgttaaacgttgtaatttcctatcgtaattataacattcccattcttttgtagatgaaacttctacatattgaaccacagattttctgagcttctaaatgtagcctttcattgcacatttcagtgatcagaatagatatccttttacacgcacaaaagcaatagattcattcagtggacaagttccttgtttaactacacagctatgatggaatgatatatccaagttccttgcctcagtgaaatatgcatatgtatatcatgaaagtgggatgccaagtaagcttaaaatggcattctctagcaaagagattagacttttaaataactcttataaaacaggttggcgatcatttcccaagattggtttcccttgagtttttgctaaaacaaatcttagtagttttgcccgtttaaaacaactcacaatcgtaaatgctactattcctaagatatcttacctttttatttcagtttagccatgtattgtatgagtgtattagtctaagcagtgagaatcttttctatgcctctattccagcaaaaagtagaagtatcaaataaaaagggcaacttttaaaatattaagcctgaagacttctaaaaagacaagaaacatggcctaaataaccaacatagatttacatagtaagtttcacactaccttattaccaaaagcaaacacctcttactttaaactacattatcatgtatatctattgtatgctggtctttactttttgccaaaatcaacatataatgaagagatgcctttgtttcatgagattcaaacttgatgctatgctttaaaataaactcagtacttttagaaacataa

SEQ ID NO: 4784 - protein, 114 aa, Homosapiens; identical to SEQ ID NO: 682

SEQ ID NO: 4785 - DNA, 1936 bp, Homosapiens
gcgcttagagagctcggtggaagctgctaaaggcggaggcggggctctggcgagttctccttccaccttcccccacccttctctgccaaccgctgtttcagcccctagctggattccagccattgctgcagctgctccacagcccttttcaggacccaaacaaccgcagccgctgttcccaggatggtgatccgtgtatatattgcatcttcctctggctctacagcggaataaaataggaaatcttagattacactttaatgctgccacatcttggaacatctgtcacgagaactctagggagccaggggtgcagattaagaagaaacaacaagatgtgcttggtttcctagaagccaacaaaataggatttgaagaaaaagatattgcagccaatgaagagaatcggaagtggatgagagaaaatgtacctgaaaatagtcgaccagccacaggttaccccctgccacctcagattttcaatgaaagccagtatcgcggggactatgatgccttctttgaagccagagaaaataatgcagtgtatgccttcttaggcttgacagccccacctggttcaaaggaagcagaagtgcaagcaaagcagcaagcatgaaccttaagcactgtgctttaagcatcctgaaaaatgagtctccattgcttttataaaatagcagaattagctttgcttcaaaagaaataggcttaatgttgaaataatagattagttgggttttcacatgcaaacattcaaaatgaatacaaaattaaaatttgaacattatggtgattatggtgaggagaatgggatattaacataaaattatattaataagtagatatcgtagaaatagtgttgttacctgccaagccatcctgtatacaccaatgattttacaaagaaaacacccttccctccttctgccattactatggcaacttaagtgtatctgcagctctacattaaaaaggagaaagagaaataacctgtctctcattcctaagttgcctcattaattttcatgaacaagaatatgtacctttttgatgctatattactgcgattaaaaagttcttgcaggtaatgtttatgatatgttaaacgttgtaatttcctatcgtaattataacattcccattcttttgtagatgaaacttctacatattgaaccacagattttctgagcttctaaatgtagcctttcattgcacatttcagtgatcagaatagatatccttttacacgcacaaaagcaatagattcattcagtggacaagttccttgtttaactacacagctatgatggaatgatatatccaagttccttgcctcagtgaaatatgcatatgtatatcatgaaagtgggatgccaagtaagcttaaaatggcattctctagcaaagagattagacttttaaataactcttataaaacaggttggcgatcatttcccaagattggtttcccttgagtttttgctaaaacaaatcttagtagttttgcccgtttaaaacaactcacaatcgtaaatgctactattcctaagatatcttacctttttatttcagtttagccatgtattgtatgagtgtattagtctaagcagtgagaatcttttctatgcctctattccagcaaaaagtagaagtatcaaataaaaagggcaacttttaaaatattaagcctgaagacttctaaaaagacaagaaacatggcctaaataaccaacatagatttacatagtaagtttcacactaccttattaccaaaagcaaacacctcttactttaaactacattatcatgtatatctattgtatgctggtctttactttttgccaaaatcaacatataatgaagagatgcctttgtttcatgagattcaaacttgatgctatgctttaaaataaactcagtacttttagaaacataa

SEQ ID NO: 4786 - protein, 66 aa, Homosapiens
MRENVPENSRPATGYPLPPQIFNESQYRGDYDAFFEARENNAVYAFLGLTAPPGSKEAEVQAKQQA

SEQ ID NO: 4787 - DNA, 841 bp, Homosapiens
ttctccttccaccttcccccacccttctctgccaaccgctgtttcagcccctagctggattccagccattgctgcagctgctccacagcccttttcaggacccaaacaaccgcagccgctgttcccaggatggtgatccgtgtatatattgcatcttcctctggctctacagcgattaagaagaaacaacaagatgtgcttggtttcctagaagccaacaaaataggatttgaagaaaaagatattgcagccaatgaagagaatcggaagtggatgagagaaaatgtacctgaaaatagtcgaccagccacaggttaccccctgccacctcagattttcaatgaaagccagtatcgcggggactatgatgccttctttgaagccagagaaaataatgcagtgtatgccttcttaggcttgacagccccacctggttcaaaggaagcagaagtgcaagcaaagcagcaagcatgaaccttaagcactgtgctttaagcatcctgaaaaatgagtctccattgcttttataaaatagcagaattagctttgcttcaaaagaaataggcttaatgttgaaataatagattagttgggttttcacatgcaaacattcaaaatgaatacaaaattaaaatttgaacattatggtgattatggtgaggagaatgggatattaacataaaattatattaataagtagatatcgtagaaatagtgttgttacctgccaagccatcctgtatacaccaatgattttacaaagaaaacacccttccctccttctgccattactatggcaacttaagtgtatctgcagctctacattaaaaaggagaaagag

SEQ ID NO: 4788 - protein, 114 aa, Homosapiens; identical to SEQ ID NO: 682

SEQ ID NO: 4789 - DNA, 834 bp, Homosapiens
attgcatcttcctctggctctacagcgagttcagctttgtttgcttcgtgacgttggggggcacatttctgctttgaaggaaaacgaaagctaccaagttttgggagatgggagatggtgctatacggtctttagggttacgtgaagtcaagtaaaatcgcacactgattaagaagaaacaacaagatgtgcttggtttcctagaagccaacaaaataggatttgaagaaaaagatattgcagccaatgaagagaatcggaagtggatgagagaaaatgtacctgaaaatagtcgaccagccacaggttaccccctgccacctcagattttcaatgaaagccagtatcgcggggactatgatgccttctttgaagccagagaaaataatgcagtgtatgccttcttaggcttgacagccccacctggttcaaaggaagcagaagtgcaagcaaagcagcaagcatgaaccttaagcactgtgctttaagcatcctgaaaaatgagtctccattgcttttataaaatagcagaattagctttgcttcaaaagaaataggcttaatgttgaaataatagattagttgggttttcacatgcaaacattcaaaatgaatacaaaattaaaatttgaacattatggtgattatggtgaggagaatgggatattaacataaaattatattaataagtagatatcgtagaaatagtgttgttacctgccaagccatcctgtatacaccaatgattttacaaagaaaacacccttccctccttctgccattactatggcaacttaagtgtatctgcagctctacattaaaaaggagaaagag

SEQ ID NO: 4790 - protein, 66 aa, Homosapiens; identical to SEQ ID NO: 4786

SEQ ID NO: 4791 - DNA, 1787 bp, Homosapiens
attgcatcttcctctggctctacagcgagttcagctttgtttgcttcgtgacgttggggggcacatttctgctttgaaggaaaacgaaagctaccaagttttgggagatgggagatggtgctatacggtctttagggttacgtgaagtcaagtaaaatcgcacactgattaagaagaaacaacaagatgtgcttggtttcctagaagccaacaaaataggatttgaagaaaaagatattgcagccaatgaagagaatcggaagtggatgagagaaaatgtacctgaaaatagtcgaccagccacaggttaccccctgccacctcagattttcaatgaaagccagtatcgcggggactatgatgccttctttgaagccagagaaaataatgcagtgtatgccttcttaggcttgacagccccacctggttcaaaggaagcagaagtgcaagcaaagcagcaagcatgaaccttaagcactgtgctttaagcatcctgaaaaatgagtctccattgcttttataaaatagcagaattagctttgcttcaaaagaaataggcttaatgttgaaataatagattagttgggttttcacatgcaaacattcaaaatgaatacaaaattaaaatttgaacattatggtgattatggtgaggagaatgggatattaacataaaattatattaataagtagatatcgtagaaatagtgttgttacctgccaagccatcctgtatacaccaatgattttacaaagaaaacacccttccctccttctgccattactatggcaacttaagtgtatctgcagctctacattaaaaaggagaaagagaaataacctgtctctcattcctaagttgcctcattaattttcatgaacaagaatatgtacctttttgatgctatattactgcgattaaaaagttcttgcaggtaatgtttatgatatgttaaacgttgtaatttcctatcgtaattataacattcccattcttttgtagatgaaacttctacatattgaaccacagattttctgagcttctaaatgtagcctttcattgcacatttcagtgatcagaatagatatccttttacacgcacaaaagcaatagattcattcagtggacaagttccttgtttaactacacagctatgatggaatgatatatccaagttccttgcctcagtgaaatatgcatatgtatatcatgaaagtgggatgccaagtaagcttaaaatggcattctctagcaaagagattagacttttaaataactcttataaaacaggttggcgatcatttcccaagattggtttcccttgagtttttgctaaaacaaatcttagtagttttgcccgtttaaaacaactcacaatcgtaaatgctactattcctaagatatcttacctttttatttcagtttagccatgtattgtatgagtgtattagtctaagcagtgagaatcttttctatgcctctattccagcaaaaagtagaagtatcaaataaaaagggcaacttttaaaatattaagcctgaagacttctaaaaagacaagaaacatggcctaaataaccaacatagatttacatagtaagtttcacactaccttattaccaaaagcaaacacctcttactttaaactacattatcatgtatatctattgtatgctggtctttactttttgccaaaatcaacatataatgaagagatgcctttgtttcatgagattcaaacttgatgctatgctttaaaataaactcagtacttttagaaacataa

SEQ ID NO: 4792 - protein, 66 aa, Homosapiens; identical to SEQ ID NO: 4786

SEQ ID NO: 4793 - DNA, 787 bp, Homosapiens
gatgaatacgccctaagtactgagacaaggaggagtgcacttctgtaaaggatgggggtacacatgctgtaactggtggggattgagtggaggcctaccgaggcattgtaattattctggattaagaagaaacaacaagatgtgcttggtttcctagaagccaacaaaataggatttgaagaaaaagatattgcagccaatgaagagaatcggaagtggatgagagaaaatgtacctgaaaatagtcgaccagccacaggttaccccctgccacctcagattttcaatgaaagccagtatcgcggggactatgatgccttctttgaagccagagaaaataatgcagtgtatgccttcttaggcttgacagccccacctggttcaaaggaagcagaagtgcaagcaaagcagcaagcatgaaccttaagcactgtgctttaagcatcctgaaaaatgagtctccattgcttttataaaatagcagaattagctttgcttcaaaagaaataggcttaatgttgaaataatagattagttgggttttcacatgcaaacattcaaaatgaatacaaaattaaaatttgaacattatggtgattatggtgaggagaatgggatattaacataaaattatattaataagtagatatcgtagaaatagtgttgttacctgccaagccatcctgtatacaccaatgattttacaaagaaaacacccttccctccttctgccattactatggcaacttaagtgtatctgcagctctacattaaaaaggagaaagag

SEQ ID NO: 4794 - protein, 66 aa, Homosapiens; identical to SEQ ID NO: 4786

SEQ ID NO: 4795 - DNA, 1740 bp, Homosapiens
gatgaatacgccctaagtactgagacaaggaggagtgcacttctgtaaaggatgggggtacacatgctgtaactggtggggattgagtggaggcctaccgaggcattgtaattattctggattaagaagaaacaacaagatgtgcttggtttcctagaagccaacaaaataggatttgaagaaaaagatattgcagccaatgaagagaatcggaagtggatgagagaaaatgtacctgaaaatagtcgaccagccacaggttaccccctgccacctcagattttcaatgaaagccagtatcgcggggactatgatgccttctttgaagccagagaaaataatgcagtgtatgccttcttaggcttgacagccccacctggttcaaaggaagcagaagtgcaagcaaagcagcaagcatgaaccttaagcactgtgctttaagcatcctgaaaaatgagtctccattgcttttataaaatagcagaattagctttgcttcaaaagaaataggcttaatgttgaaataatagattagttgggttttcacatgcaaacattcaaaatgaatacaaaattaaaatttgaacattatggtgattatggtgaggagaatgggatattaacataaaattatattaataagtagatatcgtagaaatagtgttgttacctgccaagccatcctgtatacaccaatgattttacaaagaaaacacccttccctccttctgccattactatggcaacttaagtgtatctgcagctctacattaaaaaggagaaagagaaataacctgtctctcattcctaagttgcctcattaattttcatgaacaagaatatgtacctttttgatgctatattactgcgattaaaaagttcttgcaggtaatgtttatgatatgttaaacgttgtaatttcctatcgtaattataacattcccattcttttgtagatgaaacttctacatattgaaccacagattttctgagcttctaaatgtagcctttcattgcacatttcagtgatcagaatagatatccttttacacgcacaaaagcaatagattcattcagtggacaagttccttgtttaactacacagctatgatggaatgatatatccaagttccttgcctcagtgaaatatgcatatgtatatcatgaaagtgggatgccaagtaagcttaaaatggcattctctagcaaagagattagacttttaaataactcttataaaacaggttggcgatcatttcccaagattggtttcccttgagtttttgctaaaacaaatcttagtagttttgcccgtttaaaacaactcacaatcgtaaatgctactattcctaagatatcttacctttttatttcagtttagccatgtattgtatgagtgtattagtctaagcagtgagaatcttttctatgcctctattccagcaaaaagtagaagtatcaaataaaaagggcaacttttaaaatattaagcctgaagacttctaaaaagacaagaaacatggcctaaataaccaacatagatttacatagtaagtttcacactaccttattaccaaaagcaaacacctcttactttaaactacattatcatgtatatctattgtatgctggtctttactttttgccaaaatcaacatataatgaagagatgcctttgtttcatgagattcaaacttgatgctatgctttaaaataaactcagtacttttagaaacataa

SEQ ID NO: 4796 - protein, 66 aa, Homosapiens; identical to SEQ ID NO: 4786

SEQ ID NO: 4797 - DNA, 1017 bp, Homosapiens
gtgtgaacccgggaggcggagcttgcagtgatccgagatcgtgccactgcactccagcctgggctacagagcgagactccgtctcaaaaaaaaaaaaagtcagtgagttggggaaggcagatccaccctaaatctgctgggcacaatctaatcagcttccagcaaatataaagcaggtagaaaaacgtgaaaaagagagacaggcctagcctcccactttacatgtttctcccgtgctggacgcttcctgcctttgaacgtcggacttcaagttcttcagttttgggacttggactggctctccttgatcctcagcttgcagaaagcctattgtggaaccttgtgatcatattaagaagaaacaacaagatgtgcttggtttcctagaagccaacaaaataggatttgaagaaaaagatattgcagccaatgaagagaatcggaagtggatgagagaaaatgtacctgaaaatagtcgaccagccacaggttaccccctgccacctcagattttcaatgaaagccagtatcgcggggactatgatgccttctttgaagccagagaaaataatgcagtgtatgccttcttaggcttgacagccccacctggttcaaaggaagcagaagtgcaagcaaagcagcaagcatgaaccttaagcactgtgctttaagcatcctgaaaaatgagtctccattgcttttataaaatagcagaattagctttgcttcaaaagaaataggcttaatgttgaaataatagattagttgggttttcacatgcaaacattcaaaatgaatacaaaattaaaatttgaacattatggtgattatggtgaggagaatgggatattaacataaaattatattaataagtagatatcgtagaaatagtgttgttacctgccaagccatcctgtatacaccaatgattttacaaagaaaacacccttccctccttctgccattactatggcaacttaagtgtatctgcagctctacattaaaaaggagaaagag

SEQ ID NO: 4798 - protein, 66 aa, Homosapiens; identical to SEQ ID NO: 4786

SEQ ID NO: 4799 - DNA, 1970 bp, Homosapiens
gtgtgaacccgggaggcggagcttgcagtgatccgagatcgtgccactgcactccagcctgggctacagagcgagactccgtctcaaaaaaaaaaaaagtcagtgagttggggaaggcagatccaccctaaatctgctgggcacaatctaatcagcttccagcaaatataaagcaggtagaaaaacgtgaaaaagagagacaggcctagcctcccactttacatgtttctcccgtgctggacgcttcctgcctttgaacgtcggacttcaagttcttcagttttgggacttggactggctctccttgatcctcagcttgcagaaagcctattgtggaaccttgtgatcatattaagaagaaacaacaagatgtgcttggtttcctagaagccaacaaaataggatttgaagaaaaagatattgcagccaatgaagagaatcggaagtggatgagagaaaatgtacctgaaaatagtcgaccagccacaggttaccccctgccacctcagattttcaatgaaagccagtatcgcggggactatgatgccttctttgaagccagagaaaataatgcagtgtatgccttcttaggcttgacagccccacctggttcaaaggaagcagaagtgcaagcaaagcagcaagcatgaaccttaagcactgtgctttaagcatcctgaaaaatgagtctccattgcttttataaaatagcagaattagctttgcttcaaaagaaataggcttaatgttgaaataatagattagttgggttttcacatgcaaacattcaaaatgaatacaaaattaaaatttgaacattatggtgattatggtgaggagaatgggatattaacataaaattatattaataagtagatatcgtagaaatagtgttgttacctgccaagccatcctgtatacaccaatgattttacaaagaaaacacccttccctccttctgccattactatggcaacttaagtgtatctgcagctctacattaaaaaggagaaagagaaataacctgtctctcattcctaagttgcctcattaattttcatgaacaagaatatgtacctttttgatgctatattactgcgattaaaaagttcttgcaggtaatgtttatgatatgttaaacgttgtaatttcctatcgtaattataacattcccattcttttgtagatgaaacttctacatattgaaccacagattttctgagcttctaaatgtagcctttcattgcacatttcagtgatcagaatagatatccttttacacgcacaaaagcaatagattcattcagtggacaagttccttgtttaactacacagctatgatggaatgatatatccaagttccttgcctcagtgaaatatgcatatgtatatcatgaaagtgggatgccaagtaagcttaaaatggcattctctagcaaagagattagacttttaaataactcttataaaacaggttggcgatcatttcccaagattggtttcccttgagtttttgctaaaacaaatcttagtagttttgcccgtttaaaacaactcacaatcgtaaatgctactattcctaagatatcttacctttttatttcagtttagccatgtattgtatgagtgtattagtctaagcagtgagaatcttttctatgcctctattccagcaaaaagtagaagtatcaaataaaaagggcaacttttaaaatattaagcctgaagacttctaaaaagacaagaaacatggcctaaataaccaacatagatttacatagtaagtttcacactaccttattaccaaaagcaaacacctcttactttaaactacattatcatgtatatctattgtatgctggtctttactttttgccaaaatcaacatataatgaagagatgcctttgtttcatgagattcaaacttgatgctatgctttaaaataaactcagtacttttagaaacataa

SEQ ID NO: 4800 - protein, 66 aa, Homosapiens; identical to SEQ ID NO: 4786

SEQ ID NO: 4801 - DNA, 1770 bp, Homosapiens
ctgttaaacatttaatagaataataattattaaggatatataaaatgaatttatataagttgaattggggcattgtgtgccatttcagtgaatttgaacaatctgccaaaggattatgattctttcctgcatttgagggcttgcttcacaattaagaagaaacaacaagatgtgcttggtttcctagaagccaacaaaataggatttgaagaaaaagatattgcagccaatgaagagaatcggaagtggatgagagaaaatgtacctgaaaatagtcgaccagccacaggttaccccctgccacctcagattttcaatgaaagccagtatcgcggggactatgatgccttctttgaagccagagaaaataatgcagtgtatgccttcttaggcttgacagccccacctggttcaaaggaagcagaagtgcaagcaaagcagcaagcatgaaccttaagcactgtgctttaagcatcctgaaaaatgagtctccattgcttttataaaatagcagaattagctttgcttcaaaagaaataggcttaatgttgaaataatagattagttgggttttcacatgcaaacattcaaaatgaatacaaaattaaaatttgaacattatggtgattatggtgaggagaatgggatattaacataaaattatattaataagtagatatcgtagaaatagtgttgttacctgccaagccatcctgtatacaccaatgattttacaaagaaaacacccttccctccttctgccattactatggcaacttaagtgtatctgcagctctacattaaaaaggagaaagagaaataacctgtctctcattcctaagttgcctcattaattttcatgaacaagaatatgtacctttttgatgctatattactgcgattaaaaagttcttgcaggtaatgtttatgatatgttaaacgttgtaatttcctatcgtaattataacattcccattcttttgtagatgaaacttctacatattgaaccacagattttctgagcttctaaatgtagcctttcattgcacatttcagtgatcagaatagatatccttttacacgcacaaaagcaatagattcattcagtggacaagttccttgtttaactacacagctatgatggaatgatatatccaagttccttgcctcagtgaaatatgcatatgtatatcatgaaagtgggatgccaagtaagcttaaaatggcattctctagcaaagagattagacttttaaataactcttataaaacaggttggcgatcatttcccaagattggtttcccttgagtttttgctaaaacaaatcttagtagttttgcccgtttaaaacaactcacaatcgtaaatgctactattcctaagatatcttacctttttatttcagtttagccatgtattgtatgagtgtattagtctaagcagtgagaatcttttctatgcctctattccagcaaaaagtagaagtatcaaataaaaagggcaacttttaaaatattaagcctgaagacttctaaaaagacaagaaacatggcctaaataaccaacatagatttacatagtaagtttcacactaccttattaccaaaagcaaacacctcttactttaaactacattatcatgtatatctattgtatgctggtctttactttttgccaaaatcaacatataatgaagagatgcctttgtttcatgagattcaaacttgatgctatgctttaaaataaactcagtacttttagaaacataa

SEQ ID NO: 4802 - protein, 66 aa, Homosapiens; identical to SEQ ID NO: 4786

SEQ ID NO: 4803 - DNA, 467 bp, Homosapiens
cgttgggagataatttgaatcatgaaggcagtttcctccatactgcttttgtggtagtgaataaatctcaccagatctgttggttttatccggcgttttcacttttgcatcttcctcattttctcttgctgcctcctcttaagaagtgtctttcaccttccgccatgattctgaggtctccccagccatgtgggactgtaagtccaattaaacctctttttctccctcgtcttgggtatgtctttatgagcagcatgaaaacagactaatacagccacattcaaagctgtcctgggcagcatgcagcccacagagccaaaccatatcaatgagtcagtagtatatttcgttatttttttaaaggatatgaagaatgaattttggtgtcatttaatattttcttctttcctctacttttgccttttttgggtaaaaatctagtgtctcttttagcttttctcccttct

SEQ ID NO: 4804 - protein, 46 aa, Homosapiens
MQPTEPNHINESVVYFVIFLKDMKNEFWCHLIFSSFLYFCLFWVKI

SEQ ID NO: 4805 - DNA, 21 bp, Homo sapiens
gcagtttactrattcttagat

SEQ ID NO: 4806 - DNA, 21 bp, Homo sapiens
aaatgctcagyctgtctaatt

SEQ ID NO: 4807 - DNA, 21 bp, Homo sapiens
gggtcctggawtgatggtgta

SEQ ID NO: 4808 - DNA, 21 bp, Homo sapiens
gtgcatctgaraatagaggct

SEQ ID NO: 4809 - DNA, 21 bp, Homo sapiens
cctgctttatraagactatat

SEQ ID NO: 4810 - DNA, 21 bp, Homo sapiens
caaaaatacawgtgtttttca

SEQ ID NO: 4811 - DNA, 21 bp, Homo sapiens
atagaggggtyatttgcaagt

SEQ ID NO: 4812 - DNA, 21 bp, Homo sapiens
gtctagtgtcrcttggctgtt

SEQ ID NO: 4813 - DNA, 21 bp, Homo sapiens
caagtcaaacmgattttaagc

SEQ ID NO: 4814 - DNA, 21 bp, Homo sapiens
gatcgacatamgtctgcacac

SEQ ID NO: 4815 - DNA, 21 bp, Homo sapiens
caaagtgagartagaatgaga

SEQ ID NO: 4816 - DNA, 21 bp, Homo sapiens
gactgtgctgsattaaccaat

SEQ ID NO: 4817 - DNA, 21 bp, Homo sapiens
gaaaactatayatcattgtaa

SEQ ID NO: 4818 - DNA, 21 bp, Homo sapiens
ccctgaggaaraaaagaagta

SEQ ID NO: 4819 - DNA, 21 bp, Homo sapiens
gcttggtccartgtgttttgg

SEQ ID NO: 4820 - DNA, 21 bp, Homo sapiens
acagggttttsttgcatagac

SEQ ID NO: 4821 - DNA, 21 bp, Homo sapiens
tgtgaaaagarcctactgttc

SEQ ID NO: 4822 - DNA, 21 bp, Homo sapiens
tttgaggcagrattttataaa

SEQ ID NO: 4823 - DNA, 21 bp, Homo sapiens
ttgtagaattrtgactagtct

SEQ ID NO: 4824 - DNA, 21 bp, Homo sapiens
cttaaaatggrtatttttact

SEQ ID NO: 4825 - DNA, 21 bp, Homo sapiens
atcctctgcasacaccttctc

SEQ ID NO: 4826 - DNA, 21 bp, Homo sapiens
aggtgatagcytgtgatatgc

SEQ ID NO: 4827 - DNA, 21 bp, Homo sapiens
aatctgtctgscacgcctgcc

SEQ ID NO: 4828 - DNA, 21 bp, Homo sapiens
tgcatgatatkgttgtttctc

SEQ ID NO: 4829 - DNA, 21 bp, Homo sapiens
cttagttagakaatttttttg

SEQ ID NO: 4830 - DNA, 21 bp, Homo sapiens
ctaagcagcartttttgaaaa

SEQ ID NO: 4831 - DNA, 21 bp, Homo sapiens
taatgcctttmagtgcagtta

SEQ ID NO: 4832 - DNA, 21 bp, Homo sapiens
gatattgtatygaagaagaac

SEQ ID NO: 4833 - DNA, 21 bp, Homo sapiens
gcttcaactgsaagtatatag

SEQ ID NO: 4834 - DNA, 21 bp, Homo sapiens
gatttggaaayactgatggcc

SEQ ID NO: 4835 - DNA, 21 bp, Homo sapiens
aaggactaaartacagcaaga

SEQ ID NO: 4836 - DNA, 21 bp, Homo sapiens
cagtttgctarattgtaaaat

SEQ ID NO: 4837 - DNA, 21 bp, Homo sapiens
tactgagagtractggtcctg

SEQ ID NO: 4838 - DNA, 21 bp, Homo sapiens
acaaggcaggwtttgccagct

SEQ ID NO: 4839 - DNA, 21 bp, Homo sapiens
gttgtatgctsttcccattag

SEQ ID NO: 4840 - DNA, 21 bp, Homo sapiens
ctcctcagagyttccctttat

SEQ ID NO: 4841 - DNA, 21 bp, Homo sapiens
ttgcccatggyacactcccct

SEQ ID NO: 4842 - DNA, 21 bp, Homo sapiens
gtaatgtgacytccaggaaat

SEQ ID NO: 4843 - DNA, 21 bp, Homo sapiens
aaattctagayaagaatctga

SEQ ID NO: 4844 - DNA, 21 bp, Homo sapiens
caaacacaatrcacattagaa

SEQ ID NO: 4845 - DNA, 21 bp, Homo sapiens
ttagtcacttwgtctgttact

SEQ ID NO: 4846 - DNA, 21 bp, Homo sapiens
ttgtctttctwagtatctgta

SEQ ID NO: 4847 - DNA, 21 bp, Homo sapiens
gacgctgtgawaggaacattc

SEQ ID NO: 4848 - DNA, 21 bp, Homo sapiens
ccatagatagrataatgaaaa

SEQ ID NO: 4849 - DNA, 21 bp, Homo sapiens
cagactgcacrtagaataata

SEQ ID NO: 4850 - DNA, 21 bp, Homo sapiens
ctgtctctcaygccttccttg

SEQ ID NO: 4851 - DNA, 21 bp, Homo sapiens
tgaacaaatgrcctattctgc

SEQ ID NO: 4852 - DNA, 21 bp, Homo sapiens
tgaacatgaaraaaaggaaat

SEQ ID NO: 4853 - DNA, 21 bp, Homo sapiens
cccaaaaaaawttctatcatt

SEQ ID NO: 4854 - DNA, 21 bp, Homo sapiens
gactcagtagsattttacctt

SEQ ID NO: 4855 - DNA, 21 bp, Homo sapiens
tagtgacttaycatagttcct

SEQ ID NO: 4856 - DNA, 21 bp, Homo sapiens
actattagatrtgctatgttt

SEQ ID NO: 4857 - DNA, 21 bp, Homo sapiens
cagaaactgtktagagcaggc

SEQ ID NO: 4858 - DNA, 21 bp, Homo sapiens
ttatttccccrcatgaaaatg

SEQ ID NO: 4859 - DNA, 21 bp, Homo sapiens
tggcagctctstcaggtcagt

SEQ ID NO: 4860 - DNA, 21 bp, Homo sapiens
tttaagcagamaggcaaaaac

SEQ ID NO: 4861 - DNA, 21 bp, Homo sapiens
tattctcttgrcataaggatt

SEQ ID NO: 4862 - DNA, 21 bp, Homo sapiens
cttctctgttktcttggacct

SEQ ID NO: 4863 - DNA, 21 bp, Homo sapiens
attatttgaartagatttgaa

SEQ ID NO: 4864 - DNA, 21 bp, Homo sapiens
gaccctgatgrcactacagct

SEQ ID NO: 4865 - DNA, 21 bp, Homo sapiens
agattagaagygacccttgtt

SEQ ID NO: 4866 - DNA, 21 bp, Homo sapiens
agtcagaattkagtctggtag

SEQ ID NO: 4867 - DNA, 21 bp, Homo sapiens
caggacaaaasggcatgtaag

SEQ ID NO: 4868 - DNA, 21 bp, Homo sapiens
gatcctctcaytcagttgtgt

SEQ ID NO: 4869 - DNA, 21 bp, Homo sapiens
caattgcaggytcacagaaac

SEQ ID NO: 4870 - DNA, 21 bp, Homo sapiens
gtaggaagtcygtcctctgcc

SEQ ID NO: 4871 - DNA, 21 bp, Homo sapiens
ttcaagatgastggattctgg

SEQ ID NO: 4872 - DNA, 21 bp, Homo sapiens
aagatgtagayacacacacaa

SEQ ID NO: 4873 - DNA, 21 bp, Homo sapiens
taaataaatgycatttgcttt

SEQ ID NO: 4874 - DNA, 21 bp, Homo sapiens
ctggacatggraggaaacaaa

SEQ ID NO: 4875 - DNA, 21 bp, Homo sapiens
taggtcatacrgatttcaaag

SEQ ID NO: 4876 - DNA, 21 bp, Homo sapiens
aatcatttgcygagtttatag

SEQ ID NO: 4877 - DNA, 21 bp, Homo sapiens
aaaacccacayggaagtcacc

SEQ ID NO: 4878 - DNA, 21 bp, Homo sapiens
gttgcagtaaytgactcagcc

SEQ ID NO: 4879 - DNA, 21 bp, Homo sapiens
tgtatacataycgccaacaag

SEQ ID NO: 4880 - DNA, 21 bp, Homo sapiens
acctacttctytgaccagttg

SEQ ID NO: 4881 - DNA, 21 bp, Homo sapiens
tacctagaggyaagaattggc

SEQ ID NO: 4882 - DNA, 21 bp, Homo sapiens
tatatgtgcasacaggtgctt

SEQ ID NO: 4883 - DNA, 21 bp, Homo sapiens
tctccttcagsacctacagct

SEQ ID NO: 4884 - DNA, 21 bp, Homo sapiens
tcagcctaaaygtttctttct

SEQ ID NO: 4885 - DNA, 21 bp, Homo sapiens
ataaaaccagsagtatgagca

SEQ ID NO: 4886 - DNA, 21 bp, Homo sapiens
ggtctttgtcyttttagtggt

SEQ ID NO: 4887 - DNA, 21 bp, Homo sapiens
caggcagtccrcatggtctag

SEQ ID NO: 4888 - DNA, 21 bp, Homo sapiens
cttgcctagcwcaaacccaag

SEQ ID NO: 4889 - DNA, 21 bp, Homo sapiens
tgttcaaaagrttcctcactt

SEQ ID NO: 4890 - DNA, 21 bp, Homo sapiens
gtctttaatcrtgtggaaagg

SEQ ID NO: 4891 - DNA, 21 bp, Homo sapiens
gtcatggggcraaactgaatt

SEQ ID NO: 4892 - DNA, 21 bp, Homo sapiens
ccaagtgccckgttccctctt

SEQ ID NO: 4893 - DNA, 21 bp, Homo sapiens
agttattaacytattcacact

SEQ ID NO: 4894 - DNA, 21 bp, Homo sapiens
gtttctaaccyctggaataaa

SEQ ID NO: 4895 - DNA, 21 bp, Homo sapiens
aacatcaaaaycatcagttgt

SEQ ID NO: 4896 - DNA, 21 bp, Homo sapiens
acagatactcrgtcggcccag

SEQ ID NO: 4897 - DNA, 21 bp, Homo sapiens
attgagcctgmtcagtaatga

SEQ ID NO: 4898 - DNA, 21 bp, Homo sapiens
atcatacattytctacttcgt

SEQ ID NO: 4899 - DNA, 21 bp, Homo sapiens
cttaattctayttgagtcacc

SEQ ID NO: 4900 - DNA, 21 bp, Homo sapiens
gatccagggtrttatgatgga

SEQ ID NO: 4901 - DNA, 21 bp, Homo sapiens
attaccctttyctgtgccctt

SEQ ID NO: 4902 - DNA, 21 bp, Homo sapiens
aaggccatagstaggagcatg

SEQ ID NO: 4903 - DNA, 21 bp, Homo sapiens
ggaacctgcartgagaagtaa

SEQ ID NO: 4904 - DNA, 21 bp, Homo sapiens
ttgtcactcayagggccaatg

SEQ ID NO: 4905 - DNA, 21 bp, Homo sapiens
ggaaaacccamagaagaatat

SEQ ID NO: 4906 - DNA, 21 bp, Homo sapiens
aatccagctcrcaaaccaaga

SEQ ID NO: 4907 - DNA, 21 bp, Homo sapiens
cctctaatggsttggtcacac

SEQ ID NO: 4908 - DNA, 21 bp, Homo sapiens
ttctttcatgyatcatgtaga

SEQ ID NO: 4909 - DNA, 21 bp, Homo sapiens
cacgcctttcyagcctcacac

SEQ ID NO: 4910 - DNA, 21 bp, Homo sapiens
atttatgtatkcaggtattca

SEQ ID NO: 4911 - DNA, 21 bp, Homo sapiens
aggagaagagmcttcaaactg

SEQ ID NO: 4912 - DNA, 21 bp, Homo sapiens
cacatctaccraccatctgac

SEQ ID NO: 4913 - DNA, 21 bp, Homo sapiens
agtggaggtcrttaggagagg

SEQ ID NO: 4914 - DNA, 21 bp, Homo sapiens
acatttaaatyatccagtctg

SEQ ID NO: 4915 - DNA, 21 bp, Homo sapiens
cccattgttcrtttttggaat

SEQ ID NO: 4916 - DNA, 21 bp, Homo sapiens
agacaacatcrtgttcttcca

SEQ ID NO: 4917 - DNA, 21 bp, Homo sapiens
tcatctcttawgcaactgaac

SEQ ID NO: 4918 - DNA, 21 bp, Homo sapiens
gcacatttcaycaagctgata

SEQ ID NO: 4919 - DNA, 21 bp, Homo sapiens
tgaatataatyataaactgag

SEQ ID NO: 4920 - DNA, 21 bp, Homo sapiens
aaggatcttascctgcatttt

SEQ ID NO: 4921 - DNA, 21 bp, Homo sapiens
ttacattacayttcttgacat

SEQ ID NO: 4922 - DNA, 21 bp, Homo sapiens
ttgggacacawtcgttggaac

SEQ ID NO: 4923 - DNA, 21 bp, Homo sapiens
tcaaagccgcwtgagaaggtg

SEQ ID NO: 4924 - DNA, 21 bp, Homo sapiens
ttgggttctcygtttcagact

SEQ ID NO: 4925 - DNA, 21 bp, Homo sapiens
aggaccaagastaaagggaaa

SEQ ID NO: 4926 - DNA, 21 bp, Homo sapiens
aggaattcaawcctcaagacc

SEQ ID NO: 4927 - DNA, 21 bp, Homo sapiens
gagccagggtycagtttgtgc

SEQ ID NO: 4928 - DNA, 21 bp, Homo sapiens
gtcataaatgrgtatttgtta

SEQ ID NO: 4929 - DNA, 21 bp, Homo sapiens
tgtgccattcsaatgtggctt

SEQ ID NO: 4930 - DNA, 21 bp, Homo sapiens
atctggatagwgatcactgag

SEQ ID NO: 4931 - DNA, 21 bp, Homo sapiens
aatgtcaactygattttagat

SEQ ID NO: 4932 - DNA, 21 bp, Homo sapiens
gttacagacamacaagttaag

SEQ ID NO: 4933 - DNA, 21 bp, Homo sapiens
aaacgagtttrttactttgag

SEQ ID NO: 4934 - DNA, 21 bp, Homo sapiens
cttacagcacwcaaaagataa

SEQ ID NO: 4935 - DNA, 21 bp, Homo sapiens
cttctcaggtrtatgacagta

SEQ ID NO: 4936 - DNA, 21 bp, Homo sapiens
caaccttatamattatcggca

SEQ ID NO: 4937 - DNA, 21 bp, Homo sapiens
gtgaagcaatrgctctagatt

SEQ ID NO: 4938 - DNA, 21 bp, Homo sapiens
ggatctgatgyacagtagtcc

SEQ ID NO: 4939 - DNA, 21 bp, Homo sapiens
gaccgtcaacygacacaaaat

SEQ ID NO: 4940 - DNA, 21 bp, Homo sapiens
catttactgaygtttgaactc

SEQ ID NO: 4941 - DNA, 21 bp, Homo sapiens
gactgaatttygcatatacag

SEQ ID NO: 4942 - DNA, 21 bp, Homo sapiens
ttacatggtcytcaacagcag

SEQ ID NO: 4943 - DNA, 21 bp, Homo sapiens
aagaaagtgaytccagagaca

SEQ ID NO: 4944 - DNA, 21 bp, Homo sapiens
cccagtctgtygaatgaagaa

SEQ ID NO: 4945 - DNA, 21 bp, Homo sapiens
gggtcctcttycagaggtttg

SEQ ID NO: 4946 - DNA, 21 bp, Homo sapiens
atccatgattrcaagtgattg

SEQ ID NO: 4947 - DNA, 21 bp, Homo sapiens
ttggttgtaaratcttagaaa

SEQ ID NO: 4948 - DNA, 21 bp, Homo sapiens
ctagaaatccwgcagacagta

SEQ ID NO: 4949 - DNA, 21 bp, Homo sapiens
ctatttaccasaagcaagcat

SEQ ID NO: 4950 - DNA, 21 bp, Homo sapiens
tgcagatggtytcactcactc

SEQ ID NO: 4951 - DNA, 21 bp, Homo sapiens
gctaagccagrcagtaaccct

SEQ ID NO: 4952 - DNA, 21 bp, Homo sapiens
ggttgttttcrttagcagctg

SEQ ID NO: 4953 - DNA, 21 bp, Homo sapiens
ccttcactaaygaggctagac

SEQ ID NO: 4954 - DNA, 21 bp, Homo sapiens
ggcctttgcaktaccctctct

SEQ ID NO: 4955 - DNA, 21 bp, Homo sapiens
aagagtcattkttgcagattc

SEQ ID NO: 4956 - DNA, 21 bp, Homo sapiens
aaatgtattaygctatgttat

SEQ ID NO: 4957 - DNA, 21 bp, Homo sapiens
aaatcctcacrttttacaaca

SEQ ID NO: 4958 - DNA, 21 bp, Homo sapiens
aaaatccttcrtgtcatttgc

SEQ ID NO: 4959 - DNA, 21 bp, Homo sapiens
tttcattgtcycaatattccc

SEQ ID NO: 4960 - DNA, 21 bp, Homo sapiens
cttggaagagrcatgtgagcc

SEQ ID NO: 4961 - DNA, 21 bp, Homo sapiens
acagaatattsctggcaaaat

SEQ ID NO: 4962 - DNA, 21 bp, Homo sapiens
ttacttatgtsctggtttatg

SEQ ID NO: 4963 - DNA, 21 bp, Homo sapiens
gtgaagcttcygagcatttgt

SEQ ID NO: 4964 - DNA, 21 bp, Homo sapiens
tttacctaagygcatctctgt

SEQ ID NO: 4965 - DNA, 21 bp, Homo sapiens
ccgaccacaaygagttctgga

SEQ ID NO: 4966 - DNA, 21 bp, Homo sapiens
tcttggactcygaagagttga

SEQ ID NO: 4967 - DNA, 21 bp, Homo sapiens
attcttcaccrgctctaggat

SEQ ID NO: 4968 - DNA, 21 bp, Homo sapiens
gcataacacayggctagcgca

SEQ ID NO: 4969 - DNA, 21 bp, Homo sapiens
tttctaatctrtgttccatag

SEQ ID NO: 4970 - DNA, 21 bp, Homo sapiens
tagtatacacragctatctaa

SEQ ID NO: 4971 - DNA, 21 bp, Homo sapiens
tgaggctgcasggaggccaga

SEQ ID NO: 4972 - DNA, 21 bp, Homo sapiens
gttttcccccraaaaggttgg

SEQ ID NO: 4973 - DNA, 21 bp, Homo sapiens
atggccccgtraggttagcgg

SEQ ID NO: 4974 - DNA, 21 bp, Homo sapiens
aggtgtcgcaragattaaggc

SEQ ID NO: 4975 - DNA, 21 bp, Homo sapiens
tgctcagctcyaaaaactcca

SEQ ID NO: 4976 - DNA, 21 bp, Homo sapiens
ctctgaggaaygaagacttag

SEQ ID NO: 4977 - DNA, 21 bp, Homo sapiens
accggctcctytccttttgct

SEQ ID NO: 4978 - DNA, 21 bp, Homo sapiens
tttttccaatkgtagagagag

SEQ ID NO: 4979 - DNA, 21 bp, Homo sapiens
aattctctacytcagaaagca

SEQ ID NO: 4980 - DNA, 21 bp, Homo sapiens
ttacttcctgktaagaggtct

SEQ ID NO: 4981 - DNA, 21 bp, Homo sapiens
agacggaagtyagagattttt

SEQ ID NO: 4982 - DNA, 21 bp, Homo sapiens
aagaaggccayagaccaggaa

SEQ ID NO: 4983 - DNA, 21 bp, Homo sapiens
gggcagtctayttagaaattg

SEQ ID NO: 4984 - DNA, 21 bp, Homo sapiens
cagtcatggtrtaaagggctc

SEQ ID NO: 4985 - DNA, 21 bp, Homo sapiens
gtcaggcagtyctcaagcaat

SEQ ID NO: 4986 - DNA, 21 bp, Homo sapiens
cagctctactkctttatgcta

SEQ ID NO: 4987 - DNA, 21 bp, Homo sapiens
tggatgcctcyaaattattct

SEQ ID NO: 4988 - DNA, 21 bp, Homo sapiens
attaagttaawcatgaagatc

SEQ ID NO: 4989 - DNA, 21 bp, Homo sapiens
tgttgttaaayggtatgtaac

SEQ ID NO: 4990 - DNA, 21 bp, Homo sapiens
atttcagactyttaagaatta

SEQ ID NO: 4991 - DNA, 21 bp, Homo sapiens
taaattacacmataaatcatt

SEQ ID NO: 4992 - DNA, 21 bp, Homo sapiens
tgctcaaaaaycatggaagaa

SEQ ID NO: 4993 - DNA, 21 bp, Homo sapiens
attactttgaragcaactgtg

SEQ ID NO: 4994 - DNA, 21 bp, Homo sapiens
attaatttacrcaaagtcatc

SEQ ID NO: 4995 - DNA, 21 bp, Homo sapiens
caaactacccmgagttagcac

SEQ ID NO: 4996 - DNA, 21 bp, Homo sapiens
ttggcattcartgatctgaaa

SEQ ID NO: 4997 - DNA, 21 bp, Homo sapiens
gttgcctgtcratggcagtct

SEQ ID NO: 4998 - DNA, 21 bp, Homo sapiens
acttccttccmttccgttaga

SEQ ID NO: 4999 - DNA, 21 bp, Homo sapiens
tctgcaaacaratcaaaacag

SEQ ID NO: 5000 - DNA, 21 bp, Homo sapiens
tcggtctctgraaaaaaatgg

SEQ ID NO: 5001 - DNA, 21 bp, Homo sapiens
cttccttttgwcagcaggaga

SEQ ID NO: 5002 - DNA, 21 bp, Homo sapiens
agattaatgtmcctgatttaa

SEQ ID NO: 5003 - DNA, 21 bp, Homo sapiens
atggcagcccmtgccactttt

SEQ ID NO: 5004 - DNA, 21 bp, Homo sapiens
aaagaattagrtgatcgatac

SEQ ID NO: 5005 - DNA, 21 bp, Homo sapiens
ctcaatgttcygaattatgag

SEQ ID NO: 5006 - DNA, 21 bp, Homo sapiens
ttaatacggcrgatttctttc

SEQ ID NO: 5007 - DNA, 21 bp, Homo sapiens
gccactcaacsccagactttt

SEQ ID NO: 5008 - DNA, 21 bp, Homo sapiens
taacaaacacwtacttcacaa

SEQ ID NO: 5009 - DNA, 21 bp, Homo sapiens
tgtttgtaatsttatgctgct

SEQ ID NO: 5010 - DNA, 21 bp, Homo sapiens
atttttaaaaytctgtgatac

SEQ ID NO: 5011 - DNA, 21 bp, Homo sapiens
gttttcaaacyattttataag

SEQ ID NO: 5012 - DNA, 21 bp, Homo sapiens
taccaatttakttcagggaga

SEQ ID NO: 5013 - DNA, 21 bp, Homo sapiens
atcttaggatyagcgttcact

SEQ ID NO: 5014 - DNA, 21 bp, Homo sapiens
aaaacattatwaaacccggtt

SEQ ID NO: 5015 - DNA, 21 bp, Homo sapiens
cagaaacacaraatcaaatac

SEQ ID NO: 5016 - DNA, 21 bp, Homo sapiens
tctgaaaatcrccatctgtaa

SEQ ID NO: 5017 - DNA, 21 bp, Homo sapiens
tctgcatagawatctaattca

SEQ ID NO: 5018 - DNA, 21 bp, Homo sapiens
caccaactagrttgaaaattg

SEQ ID NO: 5019 - DNA, 21 bp, Homo sapiens
tccttttaatwtaaatatgtt

SEQ ID NO: 5020 - DNA, 21 bp, Homo sapiens
actctctctaygtctctatat

SEQ ID NO: 5021 - DNA, 21 bp, Homo sapiens
tcctggagacwcatcagccca

SEQ ID NO: 5022 - DNA, 21 bp, Homo sapiens
ttttaatcccrtagagccaga

SEQ ID NO: 5023 - DNA, 21 bp, Homo sapiens
tcgtctcaaartagtcaagta

SEQ ID NO: 5024 - DNA, 21 bp, Homo sapiens
aggggctcacrtctcagttgc

SEQ ID NO: 5025 - DNA, 21 bp, Homo sapiens
taatagcacckgaaataaaga

SEQ ID NO: 5026 - DNA, 21 bp, Homo sapiens
tcacctcttgycagttaataa

SEQ ID NO: 5027 - DNA, 21 bp, Homo sapiens
tccagcaaaaycgtttatttt

SEQ ID NO: 5028 - DNA, 21 bp, Homo sapiens
gatctcacgtwgactctgtct

SEQ ID NO: 5029 - DNA, 21 bp, Homo sapiens
atacccattaygtagcttttc

SEQ ID NO: 5030 - DNA, 21 bp, Homo sapiens
ttaaaacatgyctcatgtgaa

SEQ ID NO: 5031 - DNA, 21 bp, Homo sapiens
agggcgtgcarctgagcggtg

SEQ ID NO: 5032 - DNA, 21 bp, Homo sapiens
tagaacttccrtccctcataa

SEQ ID NO: 5033 - DNA, 21 bp, Homo sapiens
acatgcatagrtgttgttctg

SEQ ID NO: 5034 - DNA, 21 bp, Homo sapiens
aagaaaaaatytacacttgga

SEQ ID NO: 5035 - DNA, 21 bp, Homo sapiens
taggtagaaakaggattacag

SEQ ID NO: 5036 - DNA, 21 bp, Homo sapiens
agggagtattwattgagcagt

SEQ ID NO: 5037 - DNA, 21 bp, Homo sapiens
ttgatgggagmcttaggacat

SEQ ID NO: 5038 - DNA, 21 bp, Homo sapiens
tgaggttaagrtttagaattt

SEQ ID NO: 5039 - DNA, 21 bp, Homo sapiens
ttttctacaaygaatgattct

SEQ ID NO: 5040 - DNA, 21 bp, Homo sapiens
gtgaagtcccrcaagagaggt

SEQ ID NO: 5041 - DNA, 21 bp, Homo sapiens
gaaaaagtgcrcaaaatctgc

SEQ ID NO: 5042 - DNA, 21 bp, Homo sapiens
catcacgttgmatttttaaat

SEQ ID NO: 5043 - DNA, 21 bp, Homo sapiens
tagagatcccyatagtctatc

SEQ ID NO: 5044 - DNA, 21 bp, Homo sapiens
agcaccttttycagtagtctc

SEQ ID NO: 5045 - DNA, 21 bp, Homo sapiens
gtgacattcaygtatatagtt

SEQ ID NO: 5046 - DNA, 21 bp, Homo sapiens
ttttcctactrttgaatatgc

SEQ ID NO: 5047 - DNA, 21 bp, Homo sapiens
tcagtgaattwtgattcctcc

SEQ ID NO: 5048 - DNA, 21 bp, Homo sapiens
gcgagattatrggagagaata

SEQ ID NO: 5049 - DNA, 21 bp, Homo sapiens
ttttaagacamtgacatactt

SEQ ID NO: 5050 - DNA, 21 bp, Homo sapiens
ttgagctaacyggcgcaacat

SEQ ID NO: 5051 - DNA, 21 bp, Homo sapiens
aacattgaacytgcagaatgt

SEQ ID NO: 5052 - DNA, 21 bp, Homo sapiens
tgagagcccaragtgattgag

SEQ ID NO: 5053 - DNA, 21 bp, Homo sapiens
aggaaactctrtgttattatg

SEQ ID NO: 5054 - DNA, 21 bp, Homo sapiens
ctacttcatcratccataagg

SEQ ID NO: 5055 - DNA, 21 bp, Homo sapiens
ctcataccacyagagagacgt

SEQ ID NO: 5056 - DNA, 21 bp, Homo sapiens
tacttcaccayttaaacctcc

SEQ ID NO: 5057 - DNA, 21 bp, Homo sapiens
tgaaaatcaarctcagtctat

SEQ ID NO: 5058 - DNA, 21 bp, Homo sapiens
tcatgacttcyctgctgccat

SEQ ID NO: 5059 - DNA, 21 bp, Homo sapiens
tgactgcctgyttcatttggt

SEQ ID NO: 5060 - DNA, 21 bp, Homo sapiens
gccctccatayggttcagaga

SEQ ID NO: 5061 - DNA, 21 bp, Homo sapiens
aaagccaatgrgcctaaaatt

SEQ ID NO: 5062 - DNA, 21 bp, Homo sapiens
aaagtcagagwtcttcggagg

SEQ ID NO: 5063 - DNA, 21 bp, Homo sapiens
aatataaaagytaaaaggcaa

SEQ ID NO: 5064 - DNA, 21 bp, Homo sapiens
tcctcctccarctcttacgtt

SEQ ID NO: 5065 - DNA, 21 bp, Homo sapiens
aagacacccaygtcctgagag

SEQ ID NO: 5066 - DNA, 21 bp, Homo sapiens
agcacacatgmggaattttat

SEQ ID NO: 5067 - DNA, 21 bp, Homo sapiens
aagaacccatyctagcaggtc

SEQ ID NO: 5068 - DNA, 21 bp, Homo sapiens
gtcctaggaaratgaaaaaga

SEQ ID NO: 5069 - DNA, 21 bp, Homo sapiens
agaatgattgygtttttgatt

SEQ ID NO: 5070 - DNA, 21 bp, Homo sapiens
tagaacaaatytgtgctgttg

SEQ ID NO: 5071 - DNA, 21 bp, Homo sapiens
agctgcacaayccaccttgca

SEQ ID NO: 5072 - DNA, 21 bp, Homo sapiens
ccagtggagartttccatctc

SEQ ID NO: 5073 - DNA, 21 bp, Homo sapiens
atatggaattyttgagtaact

SEQ ID NO: 5074 - DNA, 21 bp, Homo sapiens
caaaaataccratttgacaag

SEQ ID NO: 5075 - DNA, 21 bp, Homo sapiens
tgatctctccrgagctattgt

SEQ ID NO: 5076 - DNA, 21 bp, Homo sapiens
caaaatgtctkgatttcattg

SEQ ID NO: 5077 - DNA, 21 bp, Homo sapiens
actcctcaatractgttttaa

SEQ ID NO: 5078 - DNA, 21 bp, Homo sapiens
ttctctgggamcagcccagtt

SEQ ID NO: 5079 - DNA, 21 bp, Homo sapiens
gcataaacatrcggaaatacc

SEQ ID NO: 5080 - DNA, 21 bp, Homo sapiens
gccgtccatcyatccgttact

SEQ ID NO: 5081 - DNA, 21 bp, Homo sapiens
actgagtaatygtctaatgaa

SEQ ID NO: 5082 - DNA, 21 bp, Homo sapiens
atgcttcaatraacagccagt

SEQ ID NO: 5083 - DNA, 21 bp, Homo sapiens
cattttaatgmggacaaatct

SEQ ID NO: 5084 - DNA, 21 bp, Homo sapiens
ccttcatcatygatctctgga

SEQ ID NO: 5085 - DNA, 21 bp, Homo sapiens
gtattcctccytacctgattt

SEQ ID NO: 5086 - DNA, 21 bp, Homo sapiens
atgattgatarttaatttact

SEQ ID NO: 5087 - DNA, 21 bp, Homo sapiens
agggttgtgtkaggaagagat

SEQ ID NO: 5088 - DNA, 21 bp, Homo sapiens
tgtatagttcmtcctaatatc

SEQ ID NO: 5089 - DNA, 21 bp, Homo sapiens
cagttcctacyttgttgagtt

SEQ ID NO: 5090 - DNA, 21 bp, Homo sapiens
cattaagtccratctgtcctt

SEQ ID NO: 5091 - DNA, 21 bp, Homo sapiens
ctctactaggrctacaagctt

SEQ ID NO: 5092 - DNA, 21 bp, Homo sapiens
caatttaataraatcattttc

SEQ ID NO: 5093 - DNA, 21 bp, Homo sapiens
tatacaacttragaaacaaag

SEQ ID NO: 5094 - DNA, 21 bp, Homo sapiens
tgccttctatrgaatatgtct

SEQ ID NO: 5095 - DNA, 21 bp, Homo sapiens
cccatttcagrttgcctttct

SEQ ID NO: 5096 - DNA, 21 bp, Homo sapiens
tctcactctgytcagattgct

SEQ ID NO: 5097 - DNA, 21 bp, Homo sapiens
atacattttgyctgtgttcta

SEQ ID NO: 5098 - DNA, 21 bp, Homo sapiens
gcaaacagctrtcgcaagcca

SEQ ID NO: 5099 - DNA, 21 bp, Homo sapiens
gattacagaaktctcctttgt

SEQ ID NO: 5100 - DNA, 21 bp, Homo sapiens
tatgcatgcakcctgcacctc

SEQ ID NO: 5101 - DNA, 21 bp, Homo sapiens
tgcaaatgaakctattcctga

SEQ ID NO: 5102 - DNA, 21 bp, Homo sapiens
gaaggtggaartggaataaaa

SEQ ID NO: 5103 - DNA, 21 bp, Homo sapiens
atatagctcamcaaaaatatt

SEQ ID NO: 5104 - DNA, 21 bp, Homo sapiens
ttaataatttsagcactgtca

SEQ ID NO: 5105 - DNA, 21 bp, Homo sapiens
attgaattgastcttccaggg

SEQ ID NO: 5106 - DNA, 21 bp, Homo sapiens
tattaatcttmtttggacacg

SEQ ID NO: 5107 - DNA, 21 bp, Homo sapiens
atgcaatgcartaaaacactg

SEQ ID NO: 5108 - DNA, 21 bp, Homo sapiens
tggttactatyctctccccag

SEQ ID NO: 5109 - DNA, 21 bp, Homo sapiens
tgttccttctytttgggcata

SEQ ID NO: 5110 - DNA, 21 bp, Homo sapiens
agcacttcccrtttatgagag

SEQ ID NO: 5111 - DNA, 21 bp, Homo sapiens
ctactgtgacwatatatttaa

SEQ ID NO: 5112 - DNA, 21 bp, Homo sapiens
ttcccaaaggstaacggtaac

SEQ ID NO: 5113 - DNA, 21 bp, Homo sapiens
ctctatgtcamtgtccgtcta

SEQ ID NO: 5114 - DNA, 21 bp, Homo sapiens
gattttttaartcaaaagaaa

SEQ ID NO: 5115 - DNA, 21 bp, Homo sapiens
gtttccctgayagccatggct

SEQ ID NO: 5116 - DNA, 21 bp, Homo sapiens
aatgatttatstgttcctatg

SEQ ID NO: 5117 - DNA, 21 bp, Homo sapiens
ttttctaccayacttttttca

SEQ ID NO: 5118 - DNA, 21 bp, Homo sapiens
gtttatgtgaytgtgacattc

SEQ ID NO: 5119 - DNA, 21 bp, Homo sapiens
aatttttctcyttaatatatc

SEQ ID NO: 5120 - DNA, 21 bp, Homo sapiens
aatggtataaraatattaggg

SEQ ID NO: 5121 - DNA, 21 bp, Homo sapiens
ctatttgcctrtgatttttaa

SEQ ID NO: 5122 - DNA, 21 bp, Homo sapiens
atcaaagattycaattcttgg

SEQ ID NO: 5123 - DNA, 21 bp, Homo sapiens
ttggaagctamtgattattct

SEQ ID NO: 5124 - DNA, 21 bp, Homo sapiens
atcattgcttrtgtaatctga

SEQ ID NO: 5125 - DNA, 21 bp, Homo sapiens
tagttgcttcrttgcgcttac

SEQ ID NO: 5126 - DNA, 21 bp, Homo sapiens
ctgtttaaaawgtatgcaatg

SEQ ID NO: 5127 - DNA, 21 bp, Homo sapiens
agcttttaacrgttctcaaag

SEQ ID NO: 5128 - DNA, 21 bp, Homo sapiens
acaggaaatawcacggattca

SEQ ID NO: 5129 - DNA, 21 bp, Homo sapiens
gggtgcttagwaattacttat

SEQ ID NO: 5130 - DNA, 21 bp, Homo sapiens
ccaaagctcartttgtcttgg

SEQ ID NO: 5131 - DNA, 21 bp, Homo sapiens
cccagcacaaygtggcagcca

SEQ ID NO: 5132 - DNA, 21 bp, Homo sapiens
tgtagagaagrtagaagaaca

SEQ ID NO: 5133 - DNA, 21 bp, Homo sapiens
agagatacaamataataattc

SEQ ID NO: 5134 - DNA, 21 bp, Homo sapiens
acaccaaataktatttcatga

SEQ ID NO: 5135 - DNA, 21 bp, Homo sapiens
ttcaacattaytcacagaagg

SEQ ID NO: 5136 - DNA, 21 bp, Homo sapiens
tcttcctggaragaaagtcct

SEQ ID NO: 5137 - DNA, 21 bp, Homo sapiens
tgggtaactaygtgtcaagtg

SEQ ID NO: 5138 - DNA, 21 bp, Homo sapiens
aaaatacattyatgtacctta

SEQ ID NO: 5139 - DNA, 21 bp, Homo sapiens
ctctttgaaaygggcaagcta

SEQ ID NO: 5140 - DNA, 21 bp, Homo sapiens
agtcaaaaacyagaatctctc

SEQ ID NO: 5141 - DNA, 21 bp, Homo sapiens
atagatctaamctaagtgaga

SEQ ID NO: 5142 - DNA, 21 bp, Homo sapiens
ttcattttagytcttcactct

SEQ ID NO: 5143 - DNA, 21 bp, Homo sapiens
caaagaagggycacagaaacc

SEQ ID NO: 5144 - DNA, 21 bp, Homo sapiens
aacactattaygagaatgctt

SEQ ID NO: 5145 - DNA, 21 bp, Homo sapiens
tgttcattagsttttacagtg

SEQ ID NO: 5146 - DNA, 21 bp, Homo sapiens
ctgattttackttttatgtct

SEQ ID NO: 5147 - DNA, 21 bp, Homo sapiens
agcattaaatyagtccagttg

SEQ ID NO: 5148 - DNA, 21 bp, Homo sapiens
gataggattcyatgagggtgc

SEQ ID NO: 5149 - DNA, 21 bp, Homo sapiens
agtattgtaaraagtctctct

SEQ ID NO: 5150 - DNA, 21 bp, Homo sapiens
cctccattcaytagggagata

SEQ ID NO: 5151 - DNA, 21 bp, Homo sapiens
ttccctcaccrtatttctaac

SEQ ID NO: 5152 - DNA, 21 bp, Homo sapiens
tgaaagattgytttgtctctt

SEQ ID NO: 5153 - DNA, 21 bp, Homo sapiens
gtcatacttasgtcagtcttc

SEQ ID NO: 5154 - DNA, 21 bp, Homo sapiens
aggtattctgyagatataatt

SEQ ID NO: 5155 - DNA, 21 bp, Homo sapiens
agaactagtayatagtgaggg

SEQ ID NO: 5156 - DNA, 21 bp, Homo sapiens
atgaaagcaasttaagtctca

SEQ ID NO: 5157 - DNA, 21 bp, Homo sapiens
gctgcttaggrgtgcttaacc

SEQ ID NO: 5158 - DNA, 21 bp, Homo sapiens
agttaaatacygatttataaa

SEQ ID NO: 5159 - DNA, 21 bp, Homo sapiens
gcacaatagtrttgcattcct

SEQ ID NO: 5160 - DNA, 21 bp, Homo sapiens
cccaacctctygaatgcccat

SEQ ID NO: 5161 - DNA, 21 bp, Homo sapiens
ttatcatctgmaaaatgaaaa

SEQ ID NO: 5162 - DNA, 21 bp, Homo sapiens
gtactctacayaaatcttgca

SEQ ID NO: 5163 - DNA, 21 bp, Homo sapiens
acttcctttaygttttcttat

SEQ ID NO: 5164 - DNA, 21 bp, Homo sapiens
aaatggagaaycaattttacc

SEQ ID NO: 5165 - DNA, 21 bp, Homo sapiens
cagaattaagrggaattcaca

SEQ ID NO: 5166 - DNA, 21 bp, Homo sapiens
taaataacttktctaataaat

SEQ ID NO: 5167 - DNA, 21 bp, Homo sapiens
ctaaattttgrtacttcaata

SEQ ID NO: 5168 - DNA, 21 bp, Homo sapiens
gtagctattargtcttcaaac

SEQ ID NO: 5169 - DNA, 21 bp, Homo sapiens
ttagttgtcartaacactggc

SEQ ID NO: 5170 - DNA, 21 bp, Homo sapiens
aatacaaatartggtgttagt

SEQ ID NO: 5171 - DNA, 21 bp, Homo sapiens
atgaatgtgtrgtataaagct

SEQ ID NO: 5172 - DNA, 21 bp, Homo sapiens
gtttattacastaatttccct

SEQ ID NO: 5173 - DNA, 21 bp, Homo sapiens
attttcacatwtctatgcatg

SEQ ID NO: 5174 - DNA, 21 bp, Homo sapiens
aatattgctcytctgagtgcc

SEQ ID NO: 5175 - DNA, 21 bp, Homo sapiens
ctggttgtgasgaagctgtgc

SEQ ID NO: 5176 - DNA, 21 bp, Homo sapiens
aaatatctccmgttacaatat

SEQ ID NO: 5177 - DNA, 21 bp, Homo sapiens
tccaatataaytacaggcaga

SEQ ID NO: 5178 - DNA, 21 bp, Homo sapiens
gtacgccagcygaggcctcca

SEQ ID NO: 5179 - DNA, 21 bp, Homo sapiens
tccactgaagytactattatc

SEQ ID NO: 5180 - DNA, 21 bp, Homo sapiens
aaagagttcargttgaagaga

SEQ ID NO: 5181 - DNA, 21 bp, Homo sapiens
tctatgtttcygacaataaaa

SEQ ID NO: 5182 - DNA, 21 bp, Homo sapiens
atggattttcraaagtaaaac

SEQ ID NO: 5183 - DNA, 21 bp, Homo sapiens
atggcctcaayattctactct

SEQ ID NO: 5184 - DNA, 21 bp, Homo sapiens
aataaaatatrccaagaaagg

SEQ ID NO: 5185 - DNA, 21 bp, Homo sapiens
gtcacttcacyggtattcttc

SEQ ID NO: 5186 - DNA, 21 bp, Homo sapiens
tggaaagatgwaaagctcctt

SEQ ID NO: 5187 - DNA, 21 bp, Homo sapiens
aaagatttacsgacacttcaa

SEQ ID NO: 5188 - DNA, 21 bp, Homo sapiens
cagcaaatgarcaaacggtat

SEQ ID NO: 5189 - DNA, 21 bp, Homo sapiens
tttacatggcyatagctttca

SEQ ID NO: 5190 - DNA, 21 bp, Homo sapiens
gattatgtggrtaaacaacac

SEQ ID NO: 5191 - DNA, 21 bp, Homo sapiens
attgaggccayggtagaaaag

SEQ ID NO: 5192 - DNA, 21 bp, Homo sapiens
ctacaagaggrgtaaaggtta

SEQ ID NO: 5193 - DNA, 21 bp, Homo sapiens
tgggcagcttytgggaggcag

SEQ ID NO: 5194 - DNA, 21 bp, Homo sapiens
tgctgaaaatkaaattctggt

SEQ ID NO: 5195 - DNA, 21 bp, Homo sapiens
acaaaaagatmatttcacaga

SEQ ID NO: 5196 - DNA, 21 bp, Homo sapiens
acctttacatkattaatctgc

SEQ ID NO: 5197 - DNA, 21 bp, Homo sapiens
gaagcatagtkgagtcacctt

SEQ ID NO: 5198 - DNA, 21 bp, Homo sapiens
ggaagaaacartactggaaat

SEQ ID NO: 5199 - DNA, 21 bp, Homo sapiens
tcttgtatggrtaacacaaac

SEQ ID NO: 5200 - DNA, 21 bp, Homo sapiens
ttttgccatakgtagtagcgg

SEQ ID NO: 5201 - DNA, 21 bp, Homo sapiens
ttgccaaactstatatatcaa

SEQ ID NO: 5202 - DNA, 21 bp, Homo sapiens
gtggtatctarcaacagcggc

SEQ ID NO: 5203 - DNA, 21 bp, Homo sapiens
cagtaagtcasgagtttgaag

SEQ ID NO: 5204 - DNA, 21 bp, Homo sapiens
tcaacacattstagatatctg

SEQ ID NO: 5205 - DNA, 21 bp, Homo sapiens
tgagctcatasaataaatcct

SEQ ID NO: 5206 - DNA, 21 bp, Homo sapiens
ttgtcttgagragggacatgg

SEQ ID NO: 5207 - DNA, 21 bp, Homo sapiens
aacttctgccraaaacattaa

SEQ ID NO: 5208 - DNA, 21 bp, Homo sapiens
attgggcacamgtacaactat

SEQ ID NO: 5209 - DNA, 21 bp, Homo sapiens
agggaagttgwtttagatgat

SEQ ID NO: 5210 - DNA, 21 bp, Homo sapiens
tcctgaaacastttaagagaa

SEQ ID NO: 5211 - DNA, 21 bp, Homo sapiens
cttagtgagaytggttggttt

SEQ ID NO: 5212 - DNA, 21 bp, Homo sapiens
accttctttgmagaacaatac

SEQ ID NO: 5213 - DNA, 21 bp, Homo sapiens
atataatagtygtaactgcac

SEQ ID NO: 5214 - DNA, 21 bp, Homo sapiens
tcgtgacttgsttgacacaca

SEQ ID NO: 5215 - DNA, 21 bp, Homo sapiens
ttatcagttastgtgtcaatg

SEQ ID NO: 5216 - DNA, 21 bp, Homo sapiens
aaaagttctcwctatatatac

SEQ ID NO: 5217 - DNA, 21 bp, Homo sapiens
taattcaggarttgcccttat

SEQ ID NO: 5218 - DNA, 21 bp, Homo sapiens
aaatttaaaayagctgagtgt

SEQ ID NO: 5219 - DNA, 21 bp, Homo sapiens
acctcttaccrtaattccagt

SEQ ID NO: 5220 - DNA, 21 bp, Homo sapiens
ctcataatgtmcttctgctac

SEQ ID NO: 5221 - DNA, 21 bp, Homo sapiens
caaagacacaraggtttatca

SEQ ID NO: 5222 - DNA, 21 bp, Homo sapiens
gcttcacatgytgccctctca

SEQ ID NO: 5223 - DNA, 21 bp, Homo sapiens
cacacatgcartatctccctt

SEQ ID NO: 5224 - DNA, 21 bp, Homo sapiens
gggagggtcarttaccaggac

SEQ ID NO: 5225 - DNA, 21 bp, Homo sapiens
gatctggaaartaactattat

SEQ ID NO: 5226 - DNA, 21 bp, Homo sapiens
cttttccaagygtgggaataa

SEQ ID NO: 5227 - DNA, 21 bp, Homo sapiens
ggacatgttayggctgtgaaa

SEQ ID NO: 5228 - DNA, 21 bp, Homo sapiens
atgcgaggacyaaagcattct

SEQ ID NO: 5229 - DNA, 21 bp, Homo sapiens
gctattaaaaytcctgagata

SEQ ID NO: 5230 - DNA, 21 bp, Homo sapiens
gaacttactaycctttctatt

SEQ ID NO: 5231 - DNA, 21 bp, Homo sapiens
tgccagcacaygacatttgct

SEQ ID NO: 5232 - DNA, 21 bp, Homo sapiens
ctcaaagtgtyaggtgtaagg

SEQ ID NO: 5233 - DNA, 21 bp, Homo sapiens
gagaaataatycttcatgtcc

SEQ ID NO: 5234 - DNA, 21 bp, Homo sapiens
tacagagtacmcacagttctc

SEQ ID NO: 5235 - DNA, 21 bp, Homo sapiens
tacttccaacrggagaattct

SEQ ID NO: 5236 - DNA, 21 bp, Homo sapiens
caatttgcacraggttaacag

SEQ ID NO: 5237 - DNA, 21 bp, Homo sapiens
ttgctgcttasaaacaaattc

SEQ ID NO: 5238 - DNA, 21 bp, Homo sapiens
ggacagacaaktattttgtag

SEQ ID NO: 5239 - DNA, 21 bp, Homo sapiens
tagggctcttmaatagtagga

SEQ ID NO: 5240 - DNA, 21 bp, Homo sapiens
tgtttcatgtyttaaagtggg

SEQ ID NO: 5241 - DNA, 21 bp, Homo sapiens
tggacatacamtaatgtatct

SEQ ID NO: 5242 - DNA, 21 bp, Homo sapiens
ctgtcattcaktctaacttgc

SEQ ID NO: 5243 - DNA, 21 bp, Homo sapiens
aatatttagcycaatttctct

SEQ ID NO: 5244 - DNA, 21 bp, Homo sapiens
ctatcagtagyatgggaatga

SEQ ID NO: 5245 - DNA, 21 bp, Homo sapiens
cattctaacayctacaaagag

SEQ ID NO: 5246 - DNA, 21 bp, Homo sapiens
atctatgccasattccactga

SEQ ID NO: 5247 - DNA, 21 bp, Homo sapiens
tggaaagattktaatcagaaa

SEQ ID NO: 5248 - DNA, 21 bp, Homo sapiens
tatagatataygatatattgt

SEQ ID NO: 5249 - DNA, 21 bp, Homo sapiens
tctgtacccaygctctctcca

SEQ ID NO: 5250 - DNA, 21 bp, Homo sapiens
gcatacaatgyttggctaatg

SEQ ID NO: 5251 - DNA, 21 bp, Homo sapiens
agaaaatccayaagtctaaat

SEQ ID NO: 5252 - DNA, 21 bp, Homo sapiens
taagtatttayataggttatc

SEQ ID NO: 5253 - DNA, 21 bp, Homo sapiens
ttctatgcagmcctcataagg

SEQ ID NO: 5254 - DNA, 21 bp, Homo sapiens
tcaagttccaytatgcctgca

SEQ ID NO: 5255 - DNA, 21 bp, Homo sapiens
tttgtgctccrtggatgcaag

SEQ ID NO: 5256 - DNA, 21 bp, Homo sapiens
atggaaatgcmtgctcaccta

SEQ ID NO: 5257 - DNA, 21 bp, Homo sapiens
tcctaggagtrtaggatgagt

SEQ ID NO: 5258 - DNA, 21 bp, Homo sapiens
tttagagtttwttgttttatg

SEQ ID NO: 5259 - DNA, 21 bp, Homo sapiens
agtacacacastgacataatc

SEQ ID NO: 5260 - DNA, 21 bp, Homo sapiens
aatgggctaastttctactac

SEQ ID NO: 5261 - DNA, 21 bp, Homo sapiens
gaaatctaagkttctctttta

SEQ ID NO: 5262 - DNA, 21 bp, Homo sapiens
cagctggaatkcacaacgaga

SEQ ID NO: 5263 - DNA, 21 bp, Homo sapiens
tttctattagmcccttaaaaa

SEQ ID NO: 5264 - DNA, 21 bp, Homo sapiens
aggacaagctygttggaagta

SEQ ID NO: 5265 - DNA, 21 bp, Homo sapiens
aggtgctttcmtgggagtccc

SEQ ID NO: 5266 - DNA, 21 bp, Homo sapiens
cactgggactrggtatggatc

SEQ ID NO: 5267 - DNA, 21 bp, Homo sapiens
ccatttccctrgagattaaat

SEQ ID NO: 5268 - DNA, 21 bp, Homo sapiens
gttatgtatgygtgtacatgt

SEQ ID NO: 5269 - DNA, 21 bp, Homo sapiens
gctaggaggarttaaaatagc

SEQ ID NO: 5270 - DNA, 21 bp, Homo sapiens
cagtttgctckgctaagaggt

SEQ ID NO: 5271 - DNA, 21 bp, Homo sapiens
agagggccaargctttttttc

SEQ ID NO: 5272 - DNA, 21 bp, Homo sapiens
ttaaatgattkcaggtcttta

SEQ ID NO: 5273 - DNA, 21 bp, Homo sapiens
gaagttgctaygtagtgtggc

SEQ ID NO: 5274 - DNA, 21 bp, Homo sapiens
acttaatgcaycaaagtaata

SEQ ID NO: 5275 - DNA, 21 bp, Homo sapiens
tctataattamctcttgctga

SEQ ID NO: 5276 - DNA, 21 bp, Homo sapiens
tgatctttgakgttcaaaaaa

SEQ ID NO: 5277 - DNA, 21 bp, Homo sapiens
tatgccatctrcaatgactgg

SEQ ID NO: 5278 - DNA, 21 bp, Homo sapiens
aataattggtycccttgtgac

SEQ ID NO: 5279 - DNA, 21 bp, Homo sapiens
ctgtataaacrtatgaaatta

SEQ ID NO: 5280 - DNA, 21 bp, Homo sapiens
atttaaaatgrtattaccact

SEQ ID NO: 5281 - DNA, 21 bp, Homo sapiens
tacatagttaygcaaacacta

SEQ ID NO: 5282 - DNA, 21 bp, Homo sapiens
ttgcaagccargaggttctag

SEQ ID NO: 5283 - DNA, 21 bp, Homo sapiens
caacccttcastaattccaaa

SEQ ID NO: 5284 - DNA, 21 bp, Homo sapiens
agccctggagkgttggtctga

SEQ ID NO: 5285 - DNA, 21 bp, Homo sapiens
tgtggggctaygggccaggaa

SEQ ID NO: 5286 - DNA, 21 bp, Homo sapiens
gaagcaaatayggtaaaattt

SEQ ID NO: 5287 - DNA, 21 bp, Homo sapiens
aaacgggaatratggtcagac

SEQ ID NO: 5288 - DNA, 21 bp, Homo sapiens
tgcagatcacygaatttcccc

SEQ ID NO: 5289 - DNA, 21 bp, Homo sapiens
accgtgcagcyacagctcaaa

SEQ ID NO: 5290 - DNA, 21 bp, Homo sapiens
atgctcttttygtgcaccttt

SEQ ID NO: 5291 - DNA, 21 bp, Homo sapiens
ttggactgtcyggttattgtc

SEQ ID NO: 5292 - DNA, 21 bp, Homo sapiens
gctaatgtaaytttggccaca

SEQ ID NO: 5293 - DNA, 21 bp, Homo sapiens
caggtaagaayaagaaaacca

SEQ ID NO: 5294 - DNA, 21 bp, Homo sapiens
gaaacagcatyatcacatacc

SEQ ID NO: 5295 - DNA, 21 bp, Homo sapiens
gagccttgtgmatgggccggg

SEQ ID NO: 5296 - DNA, 21 bp, Homo sapiens
aaacacaggayctcttttctt

SEQ ID NO: 5297 - DNA, 21 bp, Homo sapiens
gtcaccatatrgcagcttgcc

SEQ ID NO: 5298 - DNA, 21 bp, Homo sapiens
catgcaacccragcggaagtg

SEQ ID NO: 5299 - DNA, 21 bp, Homo sapiens
caagtcatgarccctggacaa

SEQ ID NO: 5300 - DNA, 21 bp, Homo sapiens
ccccgagagcytggtcccaca

SEQ ID NO: 5301 - DNA, 21 bp, Homo sapiens
agctcagctcmctctctggac

SEQ ID NO: 5302 - DNA, 21 bp, Homo sapiens
gcctgatggamtatcacctgc

SEQ ID NO: 5303 - DNA, 21 bp, Homo sapiens
gctgaggttcwcgcctaccag

SEQ ID NO: 5304 - DNA, 21 bp, Homo sapiens
agttggtagcmcttgaccttc

SEQ ID NO: 5305 - DNA, 21 bp, Homo sapiens
atgcactgcascagctctcca

SEQ ID NO: 5306 - DNA, 21 bp, Homo sapiens
tgcctttccayctggacttat

SEQ ID NO: 5307 - DNA, 21 bp, Homo sapiens
aactgtgccayctcattgtcc

SEQ ID NO: 5308 - DNA, 21 bp, Homo sapiens
ctgttgccacyactgatgccc

SEQ ID NO: 5309 - DNA, 21 bp, Homo sapiens
tggtgccaatrtctctaaaag

SEQ ID NO: 5310 - DNA, 21 bp, Homo sapiens
cctaaaaaatrgcaagaagga

SEQ ID NO: 5311 - DNA, 21 bp, Homo sapiens
cagagggaaayttgagggagt

SEQ ID NO: 5312 - DNA, 21 bp, Homo sapiens
atatagaatawgtttcagccc

SEQ ID NO: 5313 - DNA, 21 bp, Homo sapiens
accacagaaakggagaaaaat

SEQ ID NO: 5314 - DNA, 21 bp, Homo sapiens
ctacgtctaaktattataaaa

SEQ ID NO: 5315 - DNA, 21 bp, Homo sapiens
aacagacatcmtataaactta

SEQ ID NO: 5316 - DNA, 21 bp, Homo sapiens
ttgtttgtgtsctgtggacac

SEQ ID NO: 5317 - DNA, 21 bp, Homo sapiens
tatcaatgcaytgcccaagag

SEQ ID NO: 5318 - DNA, 21 bp, Homo sapiens
acgacttgctrgaaagagggt

SEQ ID NO: 5319 - DNA, 21 bp, Homo sapiens
ttgctccaacrttttctggtc

SEQ ID NO: 5320 - DNA, 21 bp, Homo sapiens
ctccactgaastccctaagaa

SEQ ID NO: 5321 - DNA, 21 bp, Homo sapiens
acatcccatgstcccctttgt

SEQ ID NO: 5322 - DNA, 21 bp, Homo sapiens
ggaaacacttycctaagatac

SEQ ID NO: 5323 - DNA, 21 bp, Homo sapiens
gtacaggccayatgaagtccc

SEQ ID NO: 5324 - DNA, 21 bp, Homo sapiens
accaaactcarcaagagggcc

SEQ ID NO: 5325 - DNA, 21 bp, Homo sapiens
agcccccagcscgccaacagg

SEQ ID NO: 5326 - DNA, 21 bp, Homo sapiens
ttcatccactygtctagaggg

SEQ ID NO: 5327 - DNA, 21 bp, Homo sapiens
aatgaaacaarcatttcttta

SEQ ID NO: 5328 - DNA, 21 bp, Homo sapiens
cagtactaaaktcctatacta

SEQ ID NO: 5329 - DNA, 21 bp, Homo sapiens
agtctaccaargaagtgctaa

SEQ ID NO: 5330 - DNA, 21 bp, Homo sapiens
tcttatctttrtgctttcctg

SEQ ID NO: 5331 - DNA, 21 bp, Homo sapiens
taaaaagtagyaatacatagg

SEQ ID NO: 5332 - DNA, 21 bp, Homo sapiens
cttctgtcaarctttttagac

SEQ ID NO: 5333 - DNA, 21 bp, Homo sapiens
tgcctgcagtstgacactgat

SEQ ID NO: 5334 - DNA, 21 bp, Homo sapiens
cagcaaaactwtttatacatc

SEQ ID NO: 5335 - DNA, 21 bp, Homo sapiens
tttcttatcartgggccctct

SEQ ID NO: 5336 - DNA, 21 bp, Homo sapiens
agaattcatayacaaacccca

SEQ ID NO: 5337 - DNA, 21 bp, Homo sapiens
ataatttcctyctttccaatg

SEQ ID NO: 5338 - DNA, 21 bp, Homo sapiens
atagtggtagwttctgtcctg

SEQ ID NO: 5339 - DNA, 21 bp, Homo sapiens
tcacatattcyggggactgtt

SEQ ID NO: 5340 - DNA, 21 bp, Homo sapiens
agtgctaacasgtcaataata

SEQ ID NO: 5341 - DNA, 21 bp, Homo sapiens
gcttacaactmggcaaacatc

SEQ ID NO: 5342 - DNA, 21 bp, Homo sapiens
cgtatgttgasagtgcactaa

SEQ ID NO: 5343 - DNA, 21 bp, Homo sapiens
aagattgaaartcacttatga

SEQ ID NO: 5344 - DNA, 21 bp, Homo sapiens
gcatgagcatytttcattgtc

SEQ ID NO: 5345 - DNA, 21 bp, Homo sapiens
ccatggccttrgcctgtctgc

SEQ ID NO: 5346 - DNA, 21 bp, Homo sapiens
aacgatgaccsagaggctctt

SEQ ID NO: 5347 - DNA, 21 bp, Homo sapiens
cacacaggctstttaaggtaa

SEQ ID NO: 5348 - DNA, 21 bp, Homo sapiens
ggctgagtaamaatctttttg

SEQ ID NO: 5349 - DNA, 21 bp, Homo sapiens
cagaattctargttggtggtg

SEQ ID NO: 5350 - DNA, 21 bp, Homo sapiens
gaattctttgstgtaaagctt

SEQ ID NO: 5351 - DNA, 21 bp, Homo sapiens
gtatttgatcraatctctcat

SEQ ID NO: 5352 - DNA, 21 bp, Homo sapiens
ggaccacagcmtggcagagga

SEQ ID NO: 5353 - DNA, 21 bp, Homo sapiens
gaccggcccayttctgtctgg

SEQ ID NO: 5354 - DNA, 21 bp, Homo sapiens
caggcacgagmggaggtttat

SEQ ID NO: 5355 - DNA, 21 bp, Homo sapiens
tctttttggcrgtttgaaggg

SEQ ID NO: 5356 - DNA, 21 bp, Homo sapiens
ttgcatagatstctgtcaaac

SEQ ID NO: 5357 - DNA, 21 bp, Homo sapiens
cctcacaccgkgtccaggctg

SEQ ID NO: 5358 - DNA, 21 bp, Homo sapiens
gaggaaggagmccgaaagaaa

SEQ ID NO: 5359 - DNA, 21 bp, Homo sapiens
ttcccgtttgsggttggggac

SEQ ID NO: 5360 - DNA, 21 bp, Homo sapiens
atccgaaggtragtggtattt

SEQ ID NO: 5361 - DNA, 21 bp, Homo sapiens
cattattttaytttcccttat

SEQ ID NO: 5362 - DNA, 21 bp, Homo sapiens
ctaatacttasgtgtacatca

SEQ ID NO: 5363 - DNA, 21 bp, Homo sapiens
tcactctgctytttggaatgt

SEQ ID NO: 5364 - DNA, 21 bp, Homo sapiens
tgctaaacatragatactcag

SEQ ID NO: 5365 - DNA, 21 bp, Homo sapiens
agctgaaaggrctctgaatgt

SEQ ID NO: 5366 - DNA, 21 bp, Homo sapiens
agtcggcagakgctctgagat

SEQ ID NO: 5367 - DNA, 21 bp, Homo sapiens
gctgaacaggycaaactattt

SEQ ID NO: 5368 - DNA, 21 bp, Homo sapiens
aagcccccatmccagaaataa

SEQ ID NO: 5369 - DNA, 21 bp, Homo sapiens
cccgaacaggmttttgttcac

SEQ ID NO: 5370 - DNA, 21 bp, Homo sapiens
gttcctggggyttgcactgat

SEQ ID NO: 5371 - DNA, 21 bp, Homo sapiens
acaaacccacmaagaaaacag

SEQ ID NO: 5372 - DNA, 21 bp, Homo sapiens
ccatcactttyagacctgtcc

SEQ ID NO: 5373 - DNA, 21 bp, Homo sapiens
cctggatttcytactcactgt

SEQ ID NO: 5374 - DNA, 21 bp, Homo sapiens
ttttgatggtycacatgccaa

SEQ ID NO: 5375 - DNA, 21 bp, Homo sapiens
ttttctttctrcttcccaaag

SEQ ID NO: 5376 - DNA, 21 bp, Homo sapiens
gcaaaggatcwgtttccaagt

SEQ ID NO: 5377 - DNA, 21 bp, Homo sapiens
tttaaagggcwaaggctattc

SEQ ID NO: 5378 - DNA, 21 bp, Homo sapiens
aaacacagagstcagtggaaa

SEQ ID NO: 5379 - DNA, 21 bp, Homo sapiens
tccttggccargcatactggc

SEQ ID NO: 5380 - DNA, 21 bp, Homo sapiens
attatagcgcrcttaagttac

SEQ ID NO: 5381 - DNA, 21 bp, Homo sapiens
aagagaaacayggatggagcg

SEQ ID NO: 5382 - DNA, 21 bp, Homo sapiens
tcatgggcagkaaactgttct

SEQ ID NO: 5383 - DNA, 21 bp, Homo sapiens
gtgcttagatrtggagagcat

SEQ ID NO: 5384 - DNA, 21 bp, Homo sapiens
cggtctcaacytggttttgtt

SEQ ID NO: 5385 - DNA, 21 bp, Homo sapiens
atgacaagtgytatatgttag

SEQ ID NO: 5386 - DNA, 21 bp, Homo sapiens
ttagaaacgcrtattaaactc

SEQ ID NO: 5387 - DNA, 21 bp, Homo sapiens
ccttgaagagyccattatttc

SEQ ID NO: 5388 - DNA, 21 bp, Homo sapiens
cccggaacttktcatgcacta

SEQ ID NO: 5389 - DNA, 21 bp, Homo sapiens
cacgaaaacayagcattatgt

SEQ ID NO: 5390 - DNA, 21 bp, Homo sapiens
cagtttaatcrctcattttct

SEQ ID NO: 5391 - DNA, 21 bp, Homo sapiens
ttcaaggttasctgaatattt

SEQ ID NO: 5392 - DNA, 21 bp, Homo sapiens
gtgaacgtcaytacaaagtgc

SEQ ID NO: 5393 - DNA, 21 bp, Homo sapiens
atagctcctgktacttttggc

SEQ ID NO: 5394 - DNA, 21 bp, Homo sapiens
gcttaaagttrtgtctatagc

SEQ ID NO: 5395 - DNA, 21 bp, Homo sapiens
atcccatcttyccagaggaga

SEQ ID NO: 5396 - DNA, 21 bp, Homo sapiens
atgcagctgtktgcagatggc

SEQ ID NO: 5397 - DNA, 21 bp, Homo sapiens
tgtggaaataytgttgtaaaa

SEQ ID NO: 5398 - DNA, 21 bp, Homo sapiens
tttcaagctgkccaacaccca

SEQ ID NO: 5399 - DNA, 21 bp, Homo sapiens
agtctttcccwttcaaatcaa

SEQ ID NO: 5400 - DNA, 21 bp, Homo sapiens
tctggtcatcrttatttttgg

SEQ ID NO: 5401 - DNA, 21 bp, Homo sapiens
ttactcttcayctaagtttag

SEQ ID NO: 5402 - DNA, 21 bp, Homo sapiens
attgatttccrtgagctgagc

SEQ ID NO: 5403 - DNA, 21 bp, Homo sapiens
atttggagcayttgccagagc

SEQ ID NO: 5404 - DNA, 21 bp, Homo sapiens
atattttgtaygattctaatt

SEQ ID NO: 5405 - DNA, 21 bp, Homo sapiens
atcctaatccrtcatcttcta

SEQ ID NO: 5406 - DNA, 21 bp, Homo sapiens
taactttctgytgaaatgaaa

SEQ ID NO: 5407 - DNA, 21 bp, Homo sapiens
cagaattaccrtaagacaggc

SEQ ID NO: 5408 - DNA, 21 bp, Homo sapiens
cattaatttcrgagaaattgt

SEQ ID NO: 5409 - DNA, 21 bp, Homo sapiens
acttttaggtytcaggaaatt

SEQ ID NO: 5410 - DNA, 21 bp, Homo sapiens
agcagactaasaaaaatttat

SEQ ID NO: 5411 - DNA, 21 bp, Homo sapiens
acacttagacwgattccatgt

SEQ ID NO: 5412 - DNA, 21 bp, Homo sapiens
aggtttgacaratgctggctt

SEQ ID NO: 5413 - DNA, 21 bp, Homo sapiens
gtcagagtttrttggaatttt

SEQ ID NO: 5414 - DNA, 21 bp, Homo sapiens
tattaatattrtgtttatgat

SEQ ID NO: 5415 - DNA, 21 bp, Homo sapiens
gtgaaatggcrgcattctctt

SEQ ID NO: 5416 - DNA, 21 bp, Homo sapiens
attttactatmaatgaatatt

SEQ ID NO: 5417 - DNA, 21 bp, Homo sapiens
acgtagggtasatggtgggat

SEQ ID NO: 5418 - DNA, 21 bp, Homo sapiens
cagcttgagtwatagtttgaa

SEQ ID NO: 5419 - DNA, 21 bp, Homo sapiens
ttgagtgttarcgttgctaat

SEQ ID NO: 5420 - DNA, 21 bp, Homo sapiens
aattggtagtstgcctccata

SEQ ID NO: 5421 - DNA, 21 bp, Homo sapiens
taaactgtgartcagtaaaat

SEQ ID NO: 5422 - DNA, 21 bp, Homo sapiens
aattttcctawtgtattggct

SEQ ID NO: 5423 - DNA, 21 bp, Homo sapiens
attttggtttyatttgtccat

SEQ ID NO: 5424 - DNA, 21 bp, Homo sapiens
aaaaaggaagyacatcttgtg

SEQ ID NO: 5425 - DNA, 21 bp, Homo sapiens
cacttaaaaamctagctctta

SEQ ID NO: 5426 - DNA, 21 bp, Homo sapiens
aagatgctatygagggttctg

SEQ ID NO: 5427 - DNA, 21 bp, Homo sapiens
agtgagaatayatgacatttc

SEQ ID NO: 5428 - DNA, 21 bp, Homo sapiens
ataaaattttwaaaaaaagcc

SEQ ID NO: 5429 - DNA, 21 bp, Homo sapiens
atctaaaaacrctaatttttg

SEQ ID NO: 5430 - DNA, 21 bp, Homo sapiens
aacaggccccwaattatgcta

SEQ ID NO: 5431 - DNA, 21 bp, Homo sapiens
aattaaaaatmataaacatat

SEQ ID NO: 5432 - DNA, 21 bp, Homo sapiens
acagaaataaytgaacattgc

SEQ ID NO: 5433 - DNA, 21 bp, Homo sapiens
aaaaaggtctytattcatctt

SEQ ID NO: 5434 - DNA, 21 bp, Homo sapiens
atagtagaaakgtcagaaaat

SEQ ID NO: 5435 - DNA, 21 bp, Homo sapiens
tgttggttcartctgaatctt

SEQ ID NO: 5436 - DNA, 21 bp, Homo sapiens
actaatcaaasagtgccatat

SEQ ID NO: 5437 - DNA, 21 bp, Homo sapiens
ttgtctcacargaggtccatt

SEQ ID NO: 5438 - DNA, 21 bp, Homo sapiens
acaatctctayttacttatgt

SEQ ID NO: 5439 - DNA, 21 bp, Homo sapiens
atatgccatgygtatagcaac

SEQ ID NO: 5440 - DNA, 21 bp, Homo sapiens
gttcatatttktctccaagat

SEQ ID NO: 5441 - DNA, 21 bp, Homo sapiens
tttggtttacrttaaatcaag

SEQ ID NO: 5442 - DNA, 21 bp, Homo sapiens
tccagcagcaygttactgtct

SEQ ID NO: 5443 - DNA, 21 bp, Homo sapiens
cttttaatggrtcctatgtaa

SEQ ID NO: 5444 - DNA, 21 bp, Homo sapiens
cctgttgattktttagctgaa

SEQ ID NO: 5445 - DNA, 21 bp, Homo sapiens
ttaaagcctgyaagcaccaaa

SEQ ID NO: 5446 - DNA, 21 bp, Homo sapiens
cctccttgttkctctccaaat

SEQ ID NO: 5447 - DNA, 21 bp, Homo sapiens
cttttggagayccctaacaat

SEQ ID NO: 5448 - DNA, 21 bp, Homo sapiens
tctgtaaagcrctctcatttc

SEQ ID NO: 5449 - DNA, 21 bp, Homo sapiens
gatttccactwcaagttggtt

SEQ ID NO: 5450 - DNA, 21 bp, Homo sapiens
ggatatggccyaacaggaaaa

SEQ ID NO: 5451 - DNA, 21 bp, Homo sapiens
ttgatggaatytttacgatct

SEQ ID NO: 5452 - DNA, 21 bp, Homo sapiens
cattcttatgktgttcttcta

SEQ ID NO: 5453 - DNA, 21 bp, Homo sapiens
ctctacctcarttatacatcc

SEQ ID NO: 5454 - DNA, 21 bp, Homo sapiens
tatcttcaccrtctgtttctg

SEQ ID NO: 5455 - DNA, 21 bp, Homo sapiens
ggaaagattakatttgagcca

SEQ ID NO: 5456 - DNA, 21 bp, Homo sapiens
aggcacttcakttcaaaaatc

SEQ ID NO: 5457 - DNA, 21 bp, Homo sapiens
cctgtctctargtcatgcatt

SEQ ID NO: 5458 - DNA, 21 bp, Homo sapiens
gcacatgaatygatataaaga

SEQ ID NO: 5459 - DNA, 21 bp, Homo sapiens
cagacaatggyaaagaagctt

SEQ ID NO: 5460 - DNA, 21 bp, Homo sapiens
ctacttgaagsccacagagat

SEQ ID NO: 5461 - DNA, 21 bp, Homo sapiens
tatgcccagtkttctggtgaa

SEQ ID NO: 5462 - DNA, 21 bp, Homo sapiens
taaggttgcaytgcctcgtga

SEQ ID NO: 5463 - DNA, 21 bp, Homo sapiens
ttttcctgaaratcatcatta

SEQ ID NO: 5464 - DNA, 21 bp, Homo sapiens
aaaggttcatyttctatcccc

SEQ ID NO: 5465 - DNA, 21 bp, Homo sapiens
gaagcactagkttcctttgat

SEQ ID NO: 5466 - DNA, 21 bp, Homo sapiens
tttatactttycttgttttgt

SEQ ID NO: 5467 - DNA, 21 bp, Homo sapiens
atacctttgartaatcacttt

SEQ ID NO: 5468 - DNA, 21 bp, Homo sapiens
gccataatgaraataatcctc

SEQ ID NO: 5469 - DNA, 21 bp, Homo sapiens
caaacttgatktctttatctt

SEQ ID NO: 5470 - DNA, 21 bp, Homo sapiens
ccagtgttacyaccttacatt

SEQ ID NO: 5471 - DNA, 21 bp, Homo sapiens
catatcgtcayatcatactgt

SEQ ID NO: 5472 - DNA, 21 bp, Homo sapiens
tttttttatcwactatgcaaa

SEQ ID NO: 5473 - DNA, 21 bp, Homo sapiens
ttgtgaactgyactaattaat

SEQ ID NO: 5474 - DNA, 21 bp, Homo sapiens
aactgtctcaygttcgataac

SEQ ID NO: 5475 - DNA, 21 bp, Homo sapiens
taaacatgggwtaaactaagt

SEQ ID NO: 5476 - DNA, 21 bp, Homo sapiens
gacaagatctrcatttgattt

SEQ ID NO: 5477 - DNA, 21 bp, Homo sapiens
tgcaaattctrtaatactttt

SEQ ID NO: 5478 - DNA, 21 bp, Homo sapiens
taatcctcackcctggaaggt

SEQ ID NO: 5479 - DNA, 21 bp, Homo sapiens
ctgaccgtcaygtttaggaag

SEQ ID NO: 5480 - DNA, 21 bp, Homo sapiens
agtttagtgaraaaccctgga

SEQ ID NO: 5481 - DNA, 21 bp, Homo sapiens
tttgctaggcwgtaaggaata

SEQ ID NO: 5482 - DNA, 21 bp, Homo sapiens
tgaagacaagractaggccga

SEQ ID NO: 5483 - DNA, 21 bp, Homo sapiens
tagaagtcgarataagttaga

SEQ ID NO: 5484 - DNA, 21 bp, Homo sapiens
cttgaagtcaycccgtgtata

SEQ ID NO: 5485 - DNA, 21 bp, Homo sapiens
ttttctggatrttaaactaca

SEQ ID NO: 5486 - DNA, 21 bp, Homo sapiens
aaccctgaggraaatttaata

SEQ ID NO: 5487 - DNA, 21 bp, Homo sapiens
ccttaggtttktatattctgt

SEQ ID NO: 5488 - DNA, 21 bp, Homo sapiens
tcctccattcrtctccatttc

SEQ ID NO: 5489 - DNA, 21 bp, Homo sapiens
caaaaatctakgtatcttcct

SEQ ID NO: 5490 - DNA, 21 bp, Homo sapiens
cttttgtcccragttccagtt

SEQ ID NO: 5491 - DNA, 21 bp, Homo sapiens
attacataagmcaactcacag

SEQ ID NO: 5492 - DNA, 21 bp, Homo sapiens
cagtatttaarttactgagct

SEQ ID NO: 5493 - DNA, 21 bp, Homo sapiens
aaactagacawctataccaat

SEQ ID NO: 5494 - DNA, 21 bp, Homo sapiens
tcctgagtagwcaccaatgcc

SEQ ID NO: 5495 - DNA, 21 bp, Homo sapiens
ttggcaaatartattcgatta

SEQ ID NO: 5496 - DNA, 21 bp, Homo sapiens
tttgcagttayaatggagctg

SEQ ID NO: 5497 - DNA, 21 bp, Homo sapiens
cttatgttggrgaagttgatt

SEQ ID NO: 5498 - DNA, 21 bp, Homo sapiens
aaagtcatctragtcagaaat

SEQ ID NO: 5499 - DNA, 21 bp, Homo sapiens
ctggactcttktattggttcg

SEQ ID NO: 5500 - DNA, 21 bp, Homo sapiens
ttttgttgttkatgttatctt

SEQ ID NO: 5501 - DNA, 21 bp, Homo sapiens
ctcaaagttaragaccatgaa

SEQ ID NO: 5502 - DNA, 21 bp, Homo sapiens
ggcttttctgrtgattcttac

SEQ ID NO: 5503 - DNA, 21 bp, Homo sapiens
ttctccttggygggtggaatt

SEQ ID NO: 5504 - DNA, 21 bp, Homo sapiens
ctttataatcragggctaaat

SEQ ID NO: 5505 - DNA, 21 bp, Homo sapiens
tagggatgaamtaatcactgt

SEQ ID NO: 5506 - DNA, 21 bp, Homo sapiens
gaggggcagcyaagatttatg

SEQ ID NO: 5507 - DNA, 21 bp, Homo sapiens
ctcataactgygtacgaagca

SEQ ID NO: 5508 - DNA, 21 bp, Homo sapiens
taggaaggacrataggtgaga

SEQ ID NO: 5509 - DNA, 21 bp, Homo sapiens
tgcctatctartattttgtgc

SEQ ID NO: 5510 - DNA, 21 bp, Homo sapiens
tacatttattygacagctact

SEQ ID NO: 5511 - DNA, 21 bp, Homo sapiens
atctttttctrtacgattctt

SEQ ID NO: 5512 - DNA, 21 bp, Homo sapiens
aagcttcttarcaatgtatat

SEQ ID NO: 5513 - DNA, 21 bp, Homo sapiens
tagtcctgggwaattgggacc

SEQ ID NO: 5514 - DNA, 21 bp, Homo sapiens
ttcatggacasctcaccttct

SEQ ID NO: 5515 - DNA, 21 bp, Homo sapiens
gaaaatggccmagataaaaat

SEQ ID NO: 5516 - DNA, 21 bp, Homo sapiens
attgaggcacwactgaaaaag

SEQ ID NO: 5517 - DNA, 21 bp, Homo sapiens
taaaagttatrttgactggct

SEQ ID NO: 5518 - DNA, 21 bp, Homo sapiens
acactaacttytttgctctca

SEQ ID NO: 5519 - DNA, 21 bp, Homo sapiens
gtggccatgcmtgaggttgag

SEQ ID NO: 5520 - DNA, 21 bp, Homo sapiens
gtttgtatggyctattgcata

SEQ ID NO: 5521 - DNA, 21 bp, Homo sapiens
ccatttatagygttccatgtg

SEQ ID NO: 5522 - DNA, 21 bp, Homo sapiens
ttcactctgaytaatggatgg

SEQ ID NO: 5523 - DNA, 21 bp, Homo sapiens
caaggtttcayttgaggtgcc

SEQ ID NO: 5524 - DNA, 21 bp, Homo sapiens
atgactggtayactttacaca

SEQ ID NO: 5525 - DNA, 21 bp, Homo sapiens
aacaggagaayggaatccctg

SEQ ID NO: 5526 - DNA, 21 bp, Homo sapiens
ctgcttttctrtggtcacatc

SEQ ID NO: 5527 - DNA, 21 bp, Homo sapiens
taagcaaattyggagatacag

SEQ ID NO: 5528 - DNA, 21 bp, Homo sapiens
aagccaaggaytggatcattt

SEQ ID NO: 5529 - DNA, 21 bp, Homo sapiens
gatatggttcrgctgtggcga

SEQ ID NO: 5530 - DNA, 21 bp, Homo sapiens
aggaaatctcrtaattgagaa

SEQ ID NO: 5531 - DNA, 21 bp, Homo sapiens
tgaacttaatyctttatccaa

SEQ ID NO: 5532 - DNA, 21 bp, Homo sapiens
cctccaaatcsttcctgagag

SEQ ID NO: 5533 - DNA, 21 bp, Homo sapiens
cttaatgttayggtgattttt

SEQ ID NO: 5534 - DNA, 21 bp, Homo sapiens
tactactttcscttaacaagg

SEQ ID NO: 5535 - DNA, 21 bp, Homo sapiens
ctgacaaatcraagcagaaaa

SEQ ID NO: 5536 - DNA, 21 bp, Homo sapiens
tcatatgcttrttgtgacttg

SEQ ID NO: 5537 - DNA, 21 bp, Homo sapiens
gctttttccaratagaggtgt

SEQ ID NO: 5538 - DNA, 21 bp, Homo sapiens
tctgtattatwcttaatggtg

SEQ ID NO: 5539 - DNA, 21 bp, Homo sapiens
ctaggaatctkgcaaagtgga

SEQ ID NO: 5540 - DNA, 21 bp, Homo sapiens
tgaaagagacrgagtctaaga

SEQ ID NO: 5541 - DNA, 21 bp, Homo sapiens
atatgtattcyggctagactg

SEQ ID NO: 5542 - DNA, 21 bp, Homo sapiens
tgtaagtacaytggcttttat

SEQ ID NO: 5543 - DNA, 21 bp, Homo sapiens
ctttataggtrcatacttatg

SEQ ID NO: 5544 - DNA, 21 bp, Homo sapiens
ggatattggcstgaagatgta

SEQ ID NO: 5545 - DNA, 21 bp, Homo sapiens
tgagatggcasatttttaata

SEQ ID NO: 5546 - DNA, 21 bp, Homo sapiens
ctaaagcccartgatatataa

SEQ ID NO: 5547 - DNA, 21 bp, Homo sapiens
tccagctggcsaaactcatgt

SEQ ID NO: 5548 - DNA, 21 bp, Homo sapiens
ggctgctgcarggaatcagtt

SEQ ID NO: 5549 - DNA, 21 bp, Homo sapiens
tttagcctcaytgggattctg

SEQ ID NO: 5550 - DNA, 21 bp, Homo sapiens
gttgtcagatmccaaggtttt

SEQ ID NO: 5551 - DNA, 21 bp, Homo sapiens
ccatagggacmggtgcacact

SEQ ID NO: 5552 - DNA, 21 bp, Homo sapiens
taaatcattckggggcttcca

SEQ ID NO: 5553 - DNA, 21 bp, Homo sapiens
gttggtcgccmaaacactaaa

SEQ ID NO: 5554 - DNA, 21 bp, Homo sapiens
gcaaaacatcytgcaatatta

SEQ ID NO: 5555 - DNA, 21 bp, Homo sapiens
ataaatgttgycaaatttgga

SEQ ID NO: 5556 - DNA, 21 bp, Homo sapiens
aaatgccttaygatttaatct

SEQ ID NO: 5557 - DNA, 21 bp, Homo sapiens
tgcctgaaaartggtaggtag

SEQ ID NO: 5558 - DNA, 21 bp, Homo sapiens
gggattgctaytttaagaagt

SEQ ID NO: 5559 - DNA, 21 bp, Homo sapiens
agtaggtaacrcccatttgtt

SEQ ID NO: 5560 - DNA, 21 bp, Homo sapiens
gactaatcaasatcaattcac

SEQ ID NO: 5561 - DNA, 21 bp, Homo sapiens
gcagccataastctctaaaag

SEQ ID NO: 5562 - DNA, 21 bp, Homo sapiens
ccagctgtatwggttttgctt

SEQ ID NO: 5563 - DNA, 21 bp, Homo sapiens
tgtggtttgaytacctgaacg

SEQ ID NO: 5564 - DNA, 21 bp, Homo sapiens
acttcttttgrcaggtatgtg

SEQ ID NO: 5565 - DNA, 21 bp, Homo sapiens
acagttgccamctctctaccc

SEQ ID NO: 5566 - DNA, 21 bp, Homo sapiens
actcatttcgkttgtttcctt

SEQ ID NO: 5567 - DNA, 21 bp, Homo sapiens
attgtgcctcrgctcataaag

SEQ ID NO: 5568 - DNA, 21 bp, Homo sapiens
cacttcctaaygggaaaccac

SEQ ID NO: 5569 - DNA, 21 bp, Homo sapiens
acaccagcagrgcgtccaatg

SEQ ID NO: 5570 - DNA, 21 bp, Homo sapiens
tactcttgccrgttttatact

SEQ ID NO: 5571 - DNA, 21 bp, Homo sapiens
ctagagactcyactaaatgct

SEQ ID NO: 5572 - DNA, 21 bp, Homo sapiens
actaggctgasggactgtgtt

SEQ ID NO: 5573 - DNA, 21 bp, Homo sapiens
tctgcagtaawactgaacaaa

SEQ ID NO: 5574 - DNA, 21 bp, Homo sapiens
tgtttgtgggkgtacacacag

SEQ ID NO: 5575 - DNA, 21 bp, Homo sapiens
tgaaagaattrtgtgtcttct

SEQ ID NO: 5576 - DNA, 21 bp, Homo sapiens
tgtatatatcrtctacgtgtc

SEQ ID NO: 5577 - DNA, 21 bp, Homo sapiens
catctttgctrtttatttttc

SEQ ID NO: 5578 - DNA, 21 bp, Homo sapiens
ggccactgacrggaataaagt

SEQ ID NO: 5579 - DNA, 21 bp, Homo sapiens
tgcccaaaatkaactcagaat

SEQ ID NO: 5580 - DNA, 21 bp, Homo sapiens
atatggcaaarctcaaagaat

SEQ ID NO: 5581 - DNA, 21 bp, Homo sapiens
ttttcatttcrtgatttacaa

SEQ ID NO: 5582 - DNA, 21 bp, Homo sapiens
ttttagtgacygaacgtgaag

SEQ ID NO: 5583 - DNA, 21 bp, Homo sapiens
tttatggtacrtcctcattca

SEQ ID NO: 5584 - DNA, 21 bp, Homo sapiens
ataaagagctmtgtcaggttc

SEQ ID NO: 5585 - DNA, 21 bp, Homo sapiens
atgttatcttyaccaaaaacg

SEQ ID NO: 5586 - DNA, 21 bp, Homo sapiens
ggtcagaaagrgatacatcaa

SEQ ID NO: 5587 - DNA, 21 bp, Homo sapiens
attgtcaatcytgatcataca

SEQ ID NO: 5588 - DNA, 21 bp, Homo sapiens
atgtgtgtgcwtggactctta

SEQ ID NO: 5589 - DNA, 21 bp, Homo sapiens
gaaggagttayagggctaatt

SEQ ID NO: 5590 - DNA, 21 bp, Homo sapiens
tatatgagttygtttgaatta

SEQ ID NO: 5591 - DNA, 21 bp, Homo sapiens
taggataataygttaaaaggt

SEQ ID NO: 5592 - DNA, 21 bp, Homo sapiens
cctcttttgtrttgttagctg

SEQ ID NO: 5593 - DNA, 21 bp, Homo sapiens
gagtttgcatsgttcctttca

SEQ ID NO: 5594 - DNA, 21 bp, Homo sapiens
gttaatgtgakgaagggtggt

SEQ ID NO: 5595 - DNA, 21 bp, Homo sapiens
tagtttgttarttgaactcct

SEQ ID NO: 5596 - DNA, 21 bp, Homo sapiens
tgagtcaggarcatcattaat

SEQ ID NO: 5597 - DNA, 21 bp, Homo sapiens
cagtggaacarctgagcaaag

SEQ ID NO: 5598 - DNA, 21 bp, Homo sapiens
tttaacttgtraggtgtagcc

SEQ ID NO: 5599 - DNA, 21 bp, Homo sapiens
attctagttaygttcactgga

SEQ ID NO: 5600 - DNA, 21 bp, Homo sapiens
ttctgtcttcygatcattcaa

SEQ ID NO: 5601 - DNA, 21 bp, Homo sapiens
tcatgaatttyggcatttttt

SEQ ID NO: 5602 - DNA, 21 bp, Homo sapiens
ttgactatctrtgaaaactgt

SEQ ID NO: 5603 - DNA, 21 bp, Homo sapiens
tcataatctasgactggatat

SEQ ID NO: 5604 - DNA, 21 bp, Homo sapiens
tattagagacytgttggcagt

SEQ ID NO: 5605 - DNA, 21 bp, Homo sapiens
atgacacttcrtctacttgaa

SEQ ID NO: 5606 - DNA, 21 bp, Homo sapiens
actttataggyatactggtag

SEQ ID NO: 5607 - DNA, 21 bp, Homo sapiens
acaaccatgaycctgaccttg

SEQ ID NO: 5608 - DNA, 21 bp, Homo sapiens
tcctcaagaamgacttgcatt

SEQ ID NO: 5609 - DNA, 21 bp, Homo sapiens
aatgtagaagyggcagaagac

SEQ ID NO: 5610 - DNA, 21 bp, Homo sapiens
aaacctacatsattctgtatg

SEQ ID NO: 5611 - DNA, 21 bp, Homo sapiens
tcatcctttcrtctttattca

SEQ ID NO: 5612 - DNA, 21 bp, Homo sapiens
ggctaaagaayagtacaaacc

SEQ ID NO: 5613 - DNA, 21 bp, Homo sapiens
cagttgtctcratgcctagta

SEQ ID NO: 5614 - DNA, 21 bp, Homo sapiens
ttgctcagggwttctatgata

SEQ ID NO: 5615 - DNA, 21 bp, Homo sapiens
gacagaaagamaatggttgtg

SEQ ID NO: 5616 - DNA, 21 bp, Homo sapiens
tgttacagaasgtatgtgttt

SEQ ID NO: 5617 - DNA, 21 bp, Homo sapiens
tgataattgastaaaggcaag

SEQ ID NO: 5618 - DNA, 21 bp, Homo sapiens
ttcaagtgttwgtttggaata

SEQ ID NO: 5619 - DNA, 21 bp, Homo sapiens
tatttaatatycttgaaaggt

SEQ ID NO: 5620 - DNA, 21 bp, Homo sapiens
ctctgatctaytccagagctg

SEQ ID NO: 5621 - DNA, 21 bp, Homo sapiens
gtctctgatamgggaaacaaa

SEQ ID NO: 5622 - DNA, 21 bp, Homo sapiens
agaaacctagyggtagcaagt

SEQ ID NO: 5623 - DNA, 21 bp, Homo sapiens
tgaagggccaygtactacctc

SEQ ID NO: 5624 - DNA, 21 bp, Homo sapiens
cttcactgaayggatagatac

SEQ ID NO: 5625 - DNA, 21 bp, Homo sapiens
ctggtcctgcrtttggctctg

SEQ ID NO: 5626 - DNA, 21 bp, Homo sapiens
gttaacttcaratactttgtc

SEQ ID NO: 5627 - DNA, 21 bp, Homo sapiens
aggatgaacargtgacttaat

SEQ ID NO: 5628 - DNA, 21 bp, Homo sapiens
ttgttgccttwgattattatt

SEQ ID NO: 5629 - DNA, 21 bp, Homo sapiens
gcagttggatsacttgatttt

SEQ ID NO: 5630 - DNA, 21 bp, Homo sapiens
ctttctagagwttacatgagg

SEQ ID NO: 5631 - DNA, 21 bp, Homo sapiens
tttgtcgaggwtgctaaaacc

SEQ ID NO: 5632 - DNA, 21 bp, Homo sapiens
aaattcaaaaygagagaaaat

SEQ ID NO: 5633 - DNA, 21 bp, Homo sapiens
aaataagattyttttgaatag

SEQ ID NO: 5634 - DNA, 21 bp, Homo sapiens
atcaatagtgrgtgcttacgg

SEQ ID NO: 5635 - DNA, 21 bp, Homo sapiens
gcattcaagtmattcaaatat

SEQ ID NO: 5636 - DNA, 21 bp, Homo sapiens
gctggtgcagkttcacgtttt

SEQ ID NO: 5637 - DNA, 21 bp, Homo sapiens
tttaaaggcarttggagaaaa

SEQ ID NO: 5638 - DNA, 21 bp, Homo sapiens
gatatatgagygatgaaattg

SEQ ID NO: 5639 - DNA, 21 bp, Homo sapiens
tgacaaccacrtacagctcaa

SEQ ID NO: 5640 - DNA, 21 bp, Homo sapiens
cctctgacttytatgagctta

SEQ ID NO: 5641 - DNA, 21 bp, Homo sapiens
attccagtacrggaggcagaa

SEQ ID NO: 5642 - DNA, 21 bp, Homo sapiens
taggagtgaaygccagtgtaa

SEQ ID NO: 5643 - DNA, 21 bp, Homo sapiens
tctatggcttrtagaagagga

SEQ ID NO: 5644 - DNA, 21 bp, Homo sapiens
tggtatttaartgagatacat

SEQ ID NO: 5645 - DNA, 21 bp, Homo sapiens
tttccaatccrttgtgaaaaa

SEQ ID NO: 5646 - DNA, 21 bp, Homo sapiens
agctcagacarcagttgtgaa

SEQ ID NO: 5647 - DNA, 21 bp, Homo sapiens
ttcctgaaccrcaattccctt

SEQ ID NO: 5648 - DNA, 21 bp, Homo sapiens
aaaactgataygtaggtaacc

SEQ ID NO: 5649 - DNA, 21 bp, Homo sapiens
ctgttctaccyggcaaggacc

SEQ ID NO: 5650 - DNA, 21 bp, Homo sapiens
tgatattggaygatactgatt

SEQ ID NO: 5651 - DNA, 21 bp, Homo sapiens
cagtaacaatktttctttagt

SEQ ID NO: 5652 - DNA, 21 bp, Homo sapiens
taaactagggracaatgactt

SEQ ID NO: 5653 - DNA, 21 bp, Homo sapiens
tagttttctgsgttttgttgt

SEQ ID NO: 5654 - DNA, 21 bp, Homo sapiens
tgctgggactyggtttctgaa

SEQ ID NO: 5655 - DNA, 21 bp, Homo sapiens
ttttaaccagraagtctttgt

SEQ ID NO: 5656 - DNA, 21 bp, Homo sapiens
tcccttctctrtaatcagcag

SEQ ID NO: 5657 - DNA, 21 bp, Homo sapiens
gagtttgaaaytccaactgct

SEQ ID NO: 5658 - DNA, 21 bp, Homo sapiens
aggctcaagcrcaaaagaaga

SEQ ID NO: 5659 - DNA, 21 bp, Homo sapiens
ttttcttaatstttctgcacc

SEQ ID NO: 5660 - DNA, 21 bp, Homo sapiens
aattagagtawgtaaagctct

SEQ ID NO: 5661 - DNA, 21 bp, Homo sapiens
tcaggaagacraaaggaccaa

SEQ ID NO: 5662 - DNA, 21 bp, Homo sapiens
ttgtgcaagckagttaaattt

SEQ ID NO: 5663 - DNA, 21 bp, Homo sapiens
agaattcttgraaacagcttc

SEQ ID NO: 5664 - DNA, 21 bp, Homo sapiens
aatgccaaaaygaacatttag

SEQ ID NO: 5665 - DNA, 21 bp, Homo sapiens
gctttgggtcwcagcttccac

SEQ ID NO: 5666 - DNA, 21 bp, Homo sapiens
tactcctgcascttctaattc

SEQ ID NO: 5667 - DNA, 21 bp, Homo sapiens
aactacatgcyactgggacag

SEQ ID NO: 5668 - DNA, 21 bp, Homo sapiens
tttcctcaggkagccatgtaa

SEQ ID NO: 5669 - DNA, 21 bp, Homo sapiens
gttatggagascatggatttt

SEQ ID NO: 5670 - DNA, 21 bp, Homo sapiens
gtctagcaagsggacacgtat

SEQ ID NO: 5671 - DNA, 21 bp, Homo sapiens
tgcaactagamtggagctttc

SEQ ID NO: 5672 - DNA, 21 bp, Homo sapiens
agtgaatgtcrtgaaatactt

SEQ ID NO: 5673 - DNA, 21 bp, Homo sapiens
aatgagtagcrcacaatactt

SEQ ID NO: 5674 - DNA, 21 bp, Homo sapiens
atttatatatygggagagctt

SEQ ID NO: 5675 - DNA, 21 bp, Homo sapiens
atataaaacawgataacattg

SEQ ID NO: 5676 - DNA, 21 bp, Homo sapiens
agtttgtaaaytgaacattat

SEQ ID NO: 5677 - DNA, 21 bp, Homo sapiens
ttgactgtgayggcacacacg

SEQ ID NO: 5678 - DNA, 21 bp, Homo sapiens
taacctcatcrtgattttaac

SEQ ID NO: 5679 - DNA, 21 bp, Homo sapiens
cttgttccagratgctagctt

SEQ ID NO: 5680 - DNA, 21 bp, Homo sapiens
gtccttcgaartcaaaacaga

SEQ ID NO: 5681 - DNA, 21 bp, Homo sapiens
atgtagcacayagggtgatat

SEQ ID NO: 5682 - DNA, 21 bp, Homo sapiens
atttttttagsttctagactc

SEQ ID NO: 5683 - DNA, 21 bp, Homo sapiens
ctattagaggrtaagcagaca

SEQ ID NO: 5684 - DNA, 21 bp, Homo sapiens
aaggctgttgytaagctgtcc

SEQ ID NO: 5685 - DNA, 21 bp, Homo sapiens
catattagtcyagttttacca

SEQ ID NO: 5686 - DNA, 21 bp, Homo sapiens
agtttgtggcmttttacactg

SEQ ID NO: 5687 - DNA, 21 bp, Homo sapiens
agtttggcatmctttggcatc

SEQ ID NO: 5688 - DNA, 21 bp, Homo sapiens
gacaattataygcattgtttc

SEQ ID NO: 5689 - DNA, 21 bp, Homo sapiens
tgaatggtacyaagaaagaat

SEQ ID NO: 5690 - DNA, 21 bp, Homo sapiens
gaagggtttaraatccttgtt

SEQ ID NO: 5691 - DNA, 21 bp, Homo sapiens
gcataaactcrggaaacgaca

SEQ ID NO: 5692 - DNA, 21 bp, Homo sapiens
ttgtgttttgkatcagagctg

SEQ ID NO: 5693 - DNA, 21 bp, Homo sapiens
aaccctggagycagatttgtc

SEQ ID NO: 5694 - DNA, 21 bp, Homo sapiens
acagggcaagratggtgtgat

SEQ ID NO: 5695 - DNA, 21 bp, Homo sapiens
tttttgaggtygaagctttat

SEQ ID NO: 5696 - DNA, 21 bp, Homo sapiens
gacatgaaaayggaatgagat

SEQ ID NO: 5697 - DNA, 21 bp, Homo sapiens
gcgattaaaartagatattct

SEQ ID NO: 5698 - DNA, 21 bp, Homo sapiens
gaatgttttasctagcagcct

SEQ ID NO: 5699 - DNA, 21 bp, Homo sapiens
agcgttgattkgcactagagt

SEQ ID NO: 5700 - DNA, 21 bp, Homo sapiens
cccttacatawcataatagca

SEQ ID NO: 5701 - DNA, 21 bp, Homo sapiens
cactccaaatrcccattcctg

SEQ ID NO: 5702 - DNA, 21 bp, Homo sapiens
agacctttgaraaagaagttg

SEQ ID NO: 5703 - DNA, 21 bp, Homo sapiens
ttatatagtarttgtcacgca

SEQ ID NO: 5704 - DNA, 21 bp, Homo sapiens
atttgacagtktatttaccag

SEQ ID NO: 5705 - DNA, 21 bp, Homo sapiens
agactctaatrttatttggtt

SEQ ID NO: 5706 - DNA, 21 bp, Homo sapiens
tgtcagtcctrtattttctgt

SEQ ID NO: 5707 - DNA, 21 bp, Homo sapiens
ggtaatatggyttttgaatat

SEQ ID NO: 5708 - DNA, 21 bp, Homo sapiens
aaacttttcartaaaccatgt

SEQ ID NO: 5709 - DNA, 21 bp, Homo sapiens
actctctgttkctaaactagg

SEQ ID NO: 5710 - DNA, 21 bp, Homo sapiens
gtaacttaaaygttgtcttca

SEQ ID NO: 5711 - DNA, 21 bp, Homo sapiens
ttactcaagaytagtgctcag

SEQ ID NO: 5712 - DNA, 21 bp, Homo sapiens
cagcctgggcracacacagcg

SEQ ID NO: 5713 - DNA, 21 bp, Homo sapiens
tgtctatcatmtattgttata

SEQ ID NO: 5714 - DNA, 21 bp, Homo sapiens
atggggggagygggggcagaa

SEQ ID NO: 5715 - DNA, 21 bp, Homo sapiens
ggtcacaggamaaccagaaag

SEQ ID NO: 5716 - DNA, 21 bp, Homo sapiens
ttgcgagatakaacttaagat

SEQ ID NO: 5717 - DNA, 21 bp, Homo sapiens
ctactactacwacaacatatt

SEQ ID NO: 5718 - DNA, 21 bp, Homo sapiens
gtctggagtasgtaatgccaa

SEQ ID NO: 5719 - DNA, 21 bp, Homo sapiens
ggtatttgaasagccactcct

SEQ ID NO: 5720 - DNA, 21 bp, Homo sapiens
ttttctttgtkaagctcttcc

SEQ ID NO: 5721 - DNA, 21 bp, Homo sapiens
gggagagggaygaggggagga

SEQ ID NO: 5722 - DNA, 21 bp, Homo sapiens
tccaaatttaytctgctgaca

SEQ ID NO: 5723 - DNA, 21 bp, Homo sapiens
ccaaagcagcwgagatcaggt

SEQ ID NO: 5724 - DNA, 21 bp, Homo sapiens
ttcctaataargaaagatttc

SEQ ID NO: 5725 - DNA, 21 bp, Homo sapiens
tttcataaagragagaaataa

SEQ ID NO: 5726 - DNA, 21 bp, Homo sapiens
atggtttctcyatattttggg

SEQ ID NO: 5727 - DNA, 21 bp, Homo sapiens
tcccgcccagrctccacatct

SEQ ID NO: 5728 - DNA, 21 bp, Homo sapiens
caggaggtatraacagtgctg

SEQ ID NO: 5729 - DNA, 21 bp, Homo sapiens
ctgccttaatmggggctatag

SEQ ID NO: 5730 - DNA, 21 bp, Homo sapiens
gtgtcctgccraggtgggagg

SEQ ID NO: 5731 - DNA, 21 bp, Homo sapiens
tcacggtgggyggatggcttg

SEQ ID NO: 5732 - DNA, 21 bp, Homo sapiens
tccagagataygagttgggac

SEQ ID NO: 5733 - DNA, 21 bp, Homo sapiens
tgcagcctcargtgcatcata

SEQ ID NO: 5734 - DNA, 21 bp, Homo sapiens
actgtggtttrcaaagtatag

SEQ ID NO: 5735 - DNA, 21 bp, Homo sapiens
ttctttgaacwgacgagtaag

SEQ ID NO: 5736 - DNA, 21 bp, Homo sapiens
ctggcagaatrcctggaatag

SEQ ID NO: 5737 - DNA, 21 bp, Homo sapiens
tcccactcacyccacaacaca

SEQ ID NO: 5738 - DNA, 21 bp, Homo sapiens
ggaaccagaaytaaaaaattt

SEQ ID NO: 5739 - DNA, 21 bp, Homo sapiens
tctttagcgcyggcactgagg

SEQ ID NO: 5740 - DNA, 21 bp, Homo sapiens
acaaaatttgrtggtaaaagt

SEQ ID NO: 5741 - DNA, 21 bp, Homo sapiens
tactttggacrgaatagaaaa

SEQ ID NO: 5742 - DNA, 21 bp, Homo sapiens
ttcgtggtaayagaggagaat

SEQ ID NO: 5743 - DNA, 21 bp, Homo sapiens
cagagagccarctagtactgc

SEQ ID NO: 5744 - DNA, 21 bp, Homo sapiens
cagtagagggrccaattcttg

SEQ ID NO: 5745 - DNA, 21 bp, Homo sapiens
atgtgtggtgktgtgacacct

SEQ ID NO: 5746 - DNA, 21 bp, Homo sapiens
ccacacctcamtaatcggatg

SEQ ID NO: 5747 - DNA, 21 bp, Homo sapiens
agtgtactttyagctgtgacc

SEQ ID NO: 5748 - DNA, 21 bp, Homo sapiens
tggaaacaagytctgaagtat

SEQ ID NO: 5749 - DNA, 21 bp, Homo sapiens
cagctctaggyaatctggcct

SEQ ID NO: 5750 - DNA, 21 bp, Homo sapiens
cctcaaatgaygtgagtagag

SEQ ID NO: 5751 - DNA, 21 bp, Homo sapiens
tgccagcaccratgctttcaa

SEQ ID NO: 5752 - DNA, 21 bp, Homo sapiens
ctgtttctttstattgctatt

SEQ ID NO: 5753 - DNA, 21 bp, Homo sapiens
gtgattgataygaaggagcat

SEQ ID NO: 5754 - DNA, 21 bp, Homo sapiens
ttgttttggargtcctaatta

SEQ ID NO: 5755 - DNA, 21 bp, Homo sapiens
caagtagggaygtgggttttc

SEQ ID NO: 5756 - DNA, 21 bp, Homo sapiens
cagtgcattamgaggacaaga

SEQ ID NO: 5757 - DNA, 21 bp, Homo sapiens
tttggaatatygattacactg

SEQ ID NO: 5758 - DNA, 21 bp, Homo sapiens
agttctggacygccatatact

SEQ ID NO: 5759 - DNA, 21 bp, Homo sapiens
gaatgactccygtgaatgacc

SEQ ID NO: 5760 - DNA, 21 bp, Homo sapiens
agtgtaacatytacatcaatg

SEQ ID NO: 5761 - DNA, 21 bp, Homo sapiens
tttccttaacrttttgcagtc

SEQ ID NO: 5762 - DNA, 21 bp, Homo sapiens
tgtgttggccrgcctatattg

SEQ ID NO: 5763 - DNA, 21 bp, Homo sapiens
cacctgttagygcaccagaaa

SEQ ID NO: 5764 - DNA, 21 bp, Homo sapiens
atagaattacrgctgggaact

SEQ ID NO: 5765 - DNA, 21 bp, Homo sapiens
attgaataatmtctgtgagca

SEQ ID NO: 5766 - DNA, 21 bp, Homo sapiens
tacagattcamctttctagta

SEQ ID NO: 5767 - DNA, 21 bp, Homo sapiens
acaatgaacaycatttaacat

SEQ ID NO: 5768 - DNA, 21 bp, Homo sapiens
acatgaatacrgttttgttgc

SEQ ID NO: 5769 - DNA, 21 bp, Homo sapiens
cacctggcacyctgttggtca

SEQ ID NO: 5770 - DNA, 21 bp, Homo sapiens
gttttcagctyctagccctgt

SEQ ID NO: 5771 - DNA, 21 bp, Homo sapiens
ccatatacttytgggccctgc

SEQ ID NO: 5772 - DNA, 21 bp, Homo sapiens
caacagtatgygcctggtact

SEQ ID NO: 5773 - DNA, 21 bp, Homo sapiens
aggcttgtacrttgggcaact

SEQ ID NO: 5774 - DNA, 21 bp, Homo sapiens
gtgttcctccrtttaggagag

SEQ ID NO: 5775 - DNA, 21 bp, Homo sapiens
ataaactagamcccctgaaat

SEQ ID NO: 5776 - DNA, 21 bp, Homo sapiens
tcttagctgcygagacatttt

SEQ ID NO: 5777 - DNA, 21 bp, Homo sapiens
ttggcacaccstctgaattag

SEQ ID NO: 5778 - DNA, 21 bp, Homo sapiens
taccagagacycacctacata

SEQ ID NO: 5779 - DNA, 21 bp, Homo sapiens
actgagaaacrgtggccatat

SEQ ID NO: 5780 - DNA, 21 bp, Homo sapiens
aatttggagayggataaggac

SEQ ID NO: 5781 - DNA, 21 bp, Homo sapiens
ttaagctcacrcaaagcacta

SEQ ID NO: 5782 - DNA, 21 bp, Homo sapiens
aggagttcacwtacaatgcat

SEQ ID NO: 5783 - DNA, 21 bp, Homo sapiens
aaggtgcactkacataaaaag

SEQ ID NO: 5784 - DNA, 21 bp, Homo sapiens
gttaagatacygccctgtcta

SEQ ID NO: 5785 - DNA, 21 bp, Homo sapiens
cttatttcaarggaaaaacac

SEQ ID NO: 5786 - DNA, 21 bp, Homo sapiens
agcctggactrtgtttctcag

SEQ ID NO: 5787 - DNA, 21 bp, Homo sapiens
agggtcacgarggagctggcc

SEQ ID NO: 5788 - DNA, 21 bp, Homo sapiens
gaccctcttcsttctccagtt

SEQ ID NO: 5789 - DNA, 21 bp, Homo sapiens
aggactccagytttactgcta

SEQ ID NO: 5790 - DNA, 21 bp, Homo sapiens
tgatgttttgsaacagaacta

SEQ ID NO: 5791 - DNA, 21 bp, Homo sapiens
caactgcatcmgtgtcccaca

SEQ ID NO: 5792 - DNA, 21 bp, Homo sapiens
cctccatgagwtgtgtagacc

SEQ ID NO: 5793 - DNA, 21 bp, Homo sapiens
tgtagggatcrgagaaattgc

SEQ ID NO: 5794 - DNA, 21 bp, Homo sapiens
caacagcttcrtggtgtattt

SEQ ID NO: 5795 - DNA, 21 bp, Homo sapiens
cctacagaacrtcttcactat

SEQ ID NO: 5796 - DNA, 21 bp, Homo sapiens
tgtcagctctrttttcaatct

SEQ ID NO: 5797 - DNA, 21 bp, Homo sapiens
tgaatggccayagtatagaat

SEQ ID NO: 5798 - DNA, 21 bp, Homo sapiens
ggagcctgttmgtgcacagtt

SEQ ID NO: 5799 - DNA, 21 bp, Homo sapiens
gttatgcatcmtctagtttat

SEQ ID NO: 5800 - DNA, 21 bp, Homo sapiens
gccttgtaaaytagtctttca

SEQ ID NO: 5801 - DNA, 21 bp, Homo sapiens
tctgcctgctstcctccagca

SEQ ID NO: 5802 - DNA, 21 bp, Homo sapiens
aaaggcctggmaagcaaggca

SEQ ID NO: 5803 - DNA, 21 bp, Homo sapiens
atgattaatakctggagaaag

SEQ ID NO: 5804 - DNA, 21 bp, Homo sapiens
tttcctgttcrcccccatggt

SEQ ID NO: 5805 - DNA, 21 bp, Homo sapiens
tcaatgaaggrcagctggtga

SEQ ID NO: 5806 - DNA, 21 bp, Homo sapiens
tcatatttgcktttagcatta

SEQ ID NO: 5807 - DNA, 21 bp, Homo sapiens
ggaggcctctraagccaaatc

SEQ ID NO: 5808 - DNA, 21 bp, Homo sapiens
gaatgtaatcragatgacgca

SEQ ID NO: 5809 - DNA, 21 bp, Homo sapiens
tatcacatcaytctacatatg

SEQ ID NO: 5810 - DNA, 21 bp, Homo sapiens
taacagtggayaaaagcctat

SEQ ID NO: 5811 - DNA, 21 bp, Homo sapiens
aagtctaacaygcagctctga

SEQ ID NO: 5812 - DNA, 21 bp, Homo sapiens
ggagttgttcrgggcaaggaa

SEQ ID NO: 5813 - DNA, 21 bp, Homo sapiens
gtaattagaarttaacaacca

SEQ ID NO: 5814 - DNA, 21 bp, Homo sapiens
ggcttgtagtyagcatacttc

SEQ ID NO: 5815 - DNA, 21 bp, Homo sapiens
tgaatcaagtyggtctacaat

SEQ ID NO: 5816 - DNA, 21 bp, Homo sapiens
ctctagtctayagttagctat

SEQ ID NO: 5817 - DNA, 21 bp, Homo sapiens
atgttctgaaraaaagccccg

SEQ ID NO: 5818 - DNA, 21 bp, Homo sapiens
ctggagaggtsctgagatgtt

SEQ ID NO: 5819 - DNA, 21 bp, Homo sapiens
tctaagaagtyagacagacat

SEQ ID NO: 5820 - DNA, 21 bp, Homo sapiens
gcaaaagggaytgtggtgtac

SEQ ID NO: 5821 - DNA, 21 bp, Homo sapiens
tacccttatayggcagaactt

SEQ ID NO: 5822 - DNA, 21 bp, Homo sapiens
aatgaacaaayaggtaatctt

SEQ ID NO: 5823 - DNA, 21 bp, Homo sapiens
attcacatacrgacacctgat

SEQ ID NO: 5824 - DNA, 21 bp, Homo sapiens
tcttcctaacycaagcacagg

SEQ ID NO: 5825 - DNA, 21 bp, Homo sapiens
attggctacawttaacaacaa

SEQ ID NO: 5826 - DNA, 21 bp, Homo sapiens
actggttcccytggtaagagc

SEQ ID NO: 5827 - DNA, 21 bp, Homo sapiens
cactgcagttstgacaactaa

SEQ ID NO: 5828 - DNA, 21 bp, Homo sapiens
agatgcctgartatagtaatc

SEQ ID NO: 5829 - DNA, 21 bp, Homo sapiens
aaatccagagrcatatatttt

SEQ ID NO: 5830 - DNA, 21 bp, Homo sapiens
gatttttcaasagcaaccttc

SEQ ID NO: 5831 - DNA, 21 bp, Homo sapiens
aatatgaaaartaagttcttt

SEQ ID NO: 5832 - DNA, 21 bp, Homo sapiens
ttaccatgtgyctgaattaca

SEQ ID NO: 5833 - DNA, 21 bp, Homo sapiens
tgagaggaccrtccagaacat

SEQ ID NO: 5834 - DNA, 21 bp, Homo sapiens
tccctttctcygagtggtttt

SEQ ID NO: 5835 - DNA, 21 bp, Homo sapiens
gttgactcttytgctggcttc

SEQ ID NO: 5836 - DNA, 21 bp, Homo sapiens
ctctttttggwttggtaggca

SEQ ID NO: 5837 - DNA, 21 bp, Homo sapiens
gaggttggcastgtcagatca

SEQ ID NO: 5838 - DNA, 21 bp, Homo sapiens
aggatagcccrtcttggtttg

SEQ ID NO: 5839 - DNA, 21 bp, Homo sapiens
aggctttttgytttgagggca

SEQ ID NO: 5840 - DNA, 21 bp, Homo sapiens
ttgtcatctgygcagtgtcct

SEQ ID NO: 5841 - DNA, 21 bp, Homo sapiens
tgaaaaatggytgctttctca

SEQ ID NO: 5842 - DNA, 21 bp, Homo sapiens
agggcatactragagccccca

SEQ ID NO: 5843 - DNA, 21 bp, Homo sapiens
ctcttttagtrtatctgaggt

SEQ ID NO: 5844 - DNA, 21 bp, Homo sapiens
atcctttaagsagatctgtag

SEQ ID NO: 5845 - DNA, 21 bp, Homo sapiens
ctcataaattrcataatacca

SEQ ID NO: 5846 - DNA, 21 bp, Homo sapiens
gagcttacttrtcgttacgta

SEQ ID NO: 5847 - DNA, 21 bp, Homo sapiens
acttagtcttmctcaaccggc

SEQ ID NO: 5848 - DNA, 21 bp, Homo sapiens
tacattgtggrtatatttggt

SEQ ID NO: 5849 - DNA, 21 bp, Homo sapiens
ccttggatctyttaagccaga

SEQ ID NO: 5850 - DNA, 21 bp, Homo sapiens
atattaaataygtctttttcc

SEQ ID NO: 5851 - DNA, 21 bp, Homo sapiens
gttacctctcygaccccacac

SEQ ID NO: 5852 - DNA, 21 bp, Homo sapiens
gattctttatyattctttgtg

SEQ ID NO: 5853 - DNA, 21 bp, Homo sapiens
atttcaaactmctcagagcat

SEQ ID NO: 5854 - DNA, 21 bp, Homo sapiens
gcaggtgtctygcatttgaga

SEQ ID NO: 5855 - DNA, 21 bp, Homo sapiens
ctgtttctccrtgtgctcaca

SEQ ID NO: 5856 - DNA, 21 bp, Homo sapiens
ttaaaaaaaaytaaaccacct

SEQ ID NO: 5857 - DNA, 21 bp, Homo sapiens
actcaaactcrtgttcttaat

SEQ ID NO: 5858 - DNA, 21 bp, Homo sapiens
gttctggcgaygggaggccat

SEQ ID NO: 5859 - DNA, 21 bp, Homo sapiens
gcactacccaytgacgcccat

SEQ ID NO: 5860 - DNA, 21 bp, Homo sapiens
ctaagatgctygtgtgtgtgt

SEQ ID NO: 5861 - DNA, 21 bp, Homo sapiens
gaaattcctcyggaggataaa

SEQ ID NO: 5862 - DNA, 21 bp, Homo sapiens
ccaggcaaaayaaaattatgt

SEQ ID NO: 5863 - DNA, 21 bp, Homo sapiens
tctagaatgcrtaaagatctc

SEQ ID NO: 5864 - DNA, 21 bp, Homo sapiens
tgaactaaatrtattccaaag

SEQ ID NO: 5865 - DNA, 21 bp, Homo sapiens
caacatacttyaggagtcatc

SEQ ID NO: 5866 - DNA, 21 bp, Homo sapiens
ttaaagtcttyagggctatta

SEQ ID NO: 5867 - DNA, 21 bp, Homo sapiens
tcaagaaaatrtgtatgcgta

SEQ ID NO: 5868 - DNA, 21 bp, Homo sapiens
aatgtctggtrtattgaaaca

SEQ ID NO: 5869 - DNA, 21 bp, Homo sapiens
ctgagagatgwaggtggatta

SEQ ID NO: 5870 - DNA, 21 bp, Homo sapiens
ctgtgtatttragttgtttcc

SEQ ID NO: 5871 - DNA, 21 bp, Homo sapiens
ttagtaatgcrtctgattgca

SEQ ID NO: 5872 - DNA, 21 bp, Homo sapiens
ttctctcttcracttctttgt

SEQ ID NO: 5873 - DNA, 21 bp, Homo sapiens
ttcttcttaasctactgatgt

SEQ ID NO: 5874 - DNA, 21 bp, Homo sapiens
gactcctgacraggtacctga

SEQ ID NO: 5875 - DNA, 21 bp, Homo sapiens
gaagagtacarttaggcccag

SEQ ID NO: 5876 - DNA, 21 bp, Homo sapiens
gcgcacgtgtwccatgtgttt

SEQ ID NO: 5877 - DNA, 21 bp, Homo sapiens
catttagactstgaccgacaa

SEQ ID NO: 5878 - DNA, 21 bp, Homo sapiens
aaatattattracacttcaga

SEQ ID NO: 5879 - DNA, 21 bp, Homo sapiens
aaacccaacasgatgactggg

SEQ ID NO: 5880 - DNA, 21 bp, Homo sapiens
tatatctacgrtgatgcctct

SEQ ID NO: 5881 - DNA, 21 bp, Homo sapiens
agaaaatcttyaccttctgtt

SEQ ID NO: 5882 - DNA, 21 bp, Homo sapiens
cacattccaamataacagaac

SEQ ID NO: 5883 - DNA, 21 bp, Homo sapiens
ggaggtggagsgtttccccac

SEQ ID NO: 5884 - DNA, 21 bp, Homo sapiens
taccaggaggwagtatgtact

SEQ ID NO: 5885 - DNA, 21 bp, Homo sapiens
ttatttgggcrtgtagctatg

SEQ ID NO: 5886 - DNA, 21 bp, Homo sapiens
agtcagagacsaaaggacttg

SEQ ID NO: 5887 - DNA, 21 bp, Homo sapiens
acttgggcagmagcatgaagc

SEQ ID NO: 5888 - DNA, 21 bp, Homo sapiens
ttcaaccagcrtaagcttcca

SEQ ID NO: 5889 - DNA, 21 bp, Homo sapiens
gccctgactgyggccagttct

SEQ ID NO: 5890 - DNA, 21 bp, Homo sapiens
ttatcaccgcyctcttcctct

SEQ ID NO: 5891 - DNA, 21 bp, Homo sapiens
gtgtacaaacraaggatatat

SEQ ID NO: 5892 - DNA, 21 bp, Homo sapiens
actgtctttgstctctgtatt

SEQ ID NO: 5893 - DNA, 21 bp, Homo sapiens
agatttaagtkcctaagttgg

SEQ ID NO: 5894 - DNA, 21 bp, Homo sapiens
tagtggcaaarcacccttctt

SEQ ID NO: 5895 - DNA, 21 bp, Homo sapiens
caatagagggytaaatttaaa

SEQ ID NO: 5896 - DNA, 21 bp, Homo sapiens
cttcatctaayccatggaaag

SEQ ID NO: 5897 - DNA, 21 bp, Homo sapiens
ctggaaattgyaaagtgacct

SEQ ID NO: 5898 - DNA, 21 bp, Homo sapiens
ttcaaaagtgmcagcagcatt

SEQ ID NO: 5899 - DNA, 21 bp, Homo sapiens
cttgggaaacwgtcattacaa

SEQ ID NO: 5900 - DNA, 21 bp, Homo sapiens
agctcagtcawtcttgtttag

SEQ ID NO: 5901 - DNA, 21 bp, Homo sapiens
gccaagctcaratcagactcc

SEQ ID NO: 5902 - DNA, 21 bp, Homo sapiens
tctccacgccrgcctgtgccc

SEQ ID NO: 5903 - DNA, 21 bp, Homo sapiens
gtctgatcacygctgtggagg

SEQ ID NO: 5904 - DNA, 21 bp, Homo sapiens
tgaatcatcargtgctattgt

SEQ ID NO: 5905 - DNA, 21 bp, Homo sapiens
agtccaccctmacctaaaaaa

SEQ ID NO: 5906 - DNA, 21 bp, Homo sapiens
tttccccaggyagctgaatca

SEQ ID NO: 5907 - DNA, 21 bp, Homo sapiens
tttactaaccrtcattacaaa

SEQ ID NO: 5908 - DNA, 21 bp, Homo sapiens
gtattcaaatygatcacctag

SEQ ID NO: 5909 - DNA, 21 bp, Homo sapiens
cctagcaagcrctgcacgaga

SEQ ID NO: 5910 - DNA, 21 bp, Homo sapiens
taggcaagacstggtatccta

SEQ ID NO: 5911 - DNA, 21 bp, Homo sapiens
aattccatgargacaggtttt

SEQ ID NO: 5912 - DNA, 21 bp, Homo sapiens
taaaagtttgytcacctcccc

SEQ ID NO: 5913 - DNA, 21 bp, Homo sapiens
tactagccagrttaagttcag

SEQ ID NO: 5914 - DNA, 21 bp, Homo sapiens
cctcacactgyctccatggtt

SEQ ID NO: 5915 - DNA, 21 bp, Homo sapiens
gaggaaacaastaggaacaat

SEQ ID NO: 5916 - DNA, 21 bp, Homo sapiens
agtagggaatktatttgcaca

SEQ ID NO: 5917 - DNA, 21 bp, Homo sapiens
gaaaacaagtwggttgagaaa

SEQ ID NO: 5918 - DNA, 21 bp, Homo sapiens
cagagcttctygcatcatttc

SEQ ID NO: 5919 - DNA, 21 bp, Homo sapiens
aacaggttatmtttcaaggcc

SEQ ID NO: 5920 - DNA, 21 bp, Homo sapiens
tttggtacgtkttgtagaaca

SEQ ID NO: 5921 - DNA, 21 bp, Homo sapiens
tttgacgacasctaccgctat

SEQ ID NO: 5922 - DNA, 21 bp, Homo sapiens
gcaccttatcygggcccaagt

SEQ ID NO: 5923 - DNA, 21 bp, Homo sapiens
cagcttgttcrggtcatgttc

SEQ ID NO: 5924 - DNA, 21 bp, Homo sapiens
gctgagcctayggtctgctct

SEQ ID NO: 5925 - DNA, 21 bp, Homo sapiens
tttatttacaraggctatttt

SEQ ID NO: 5926 - DNA, 21 bp, Homo sapiens
tactttgataytatgaaaaac

SEQ ID NO: 5927 - DNA, 21 bp, Homo sapiens
aatggccaaartagaagacat

SEQ ID NO: 5928 - DNA, 21 bp, Homo sapiens
tcttacacatraagtatatgg

SEQ ID NO: 5929 - DNA, 21 bp, Homo sapiens
ctcatctccartttgacagag

SEQ ID NO: 5930 - DNA, 21 bp, Homo sapiens
agtgtgttctycaaaaagatt

SEQ ID NO: 5931 - DNA, 21 bp, Homo sapiens
agcaaaaaatyaggaagaaaa

SEQ ID NO: 5932 - DNA, 21 bp, Homo sapiens
ttataattcartttgcagcca

SEQ ID NO: 5933 - DNA, 21 bp, Homo sapiens
agagctatcartttatagagc

SEQ ID NO: 5934 - DNA, 21 bp, Homo sapiens
agaaatgccaraatctctcaa

SEQ ID NO: 5935 - DNA, 21 bp, Homo sapiens
ttatttcatgkgatcctttca

SEQ ID NO: 5936 - DNA, 21 bp, Homo sapiens
ttattttagayatctgtggca

SEQ ID NO: 5937 - DNA, 21 bp, Homo sapiens
acatttgcccktaactttaga

SEQ ID NO: 5938 - DNA, 21 bp, Homo sapiens
ggtgattaacygcacttggct

SEQ ID NO: 5939 - DNA, 21 bp, Homo sapiens
tgttgtcaatkaaagggaaaa

SEQ ID NO: 5940 - DNA, 21 bp, Homo sapiens
tttagttgcarttaaatgctg

SEQ ID NO: 5941 - DNA, 21 bp, Homo sapiens
tgctcatctcytcagctgaca

SEQ ID NO: 5942 - DNA, 21 bp, Homo sapiens
ggtgtacaaakgattttttca

SEQ ID NO: 5943 - DNA, 21 bp, Homo sapiens
actggagacaygctcagcccc

SEQ ID NO: 5944 - DNA, 21 bp, Homo sapiens
gataatgaacrttttgttatc

SEQ ID NO: 5945 - DNA, 21 bp, Homo sapiens
ctacatatggyatactatttt

SEQ ID NO: 5946 - DNA, 21 bp, Homo sapiens
ttttgagctcrtgatcattca

SEQ ID NO: 5947 - DNA, 21 bp, Homo sapiens
cttagttttawctccacagaa

SEQ ID NO: 5948 - DNA, 21 bp, Homo sapiens
ttgccctctcmaggttttctt

SEQ ID NO: 5949 - DNA, 21 bp, Homo sapiens
actgtgcaaaraagtcgtgtc

SEQ ID NO: 5950 - DNA, 21 bp, Homo sapiens
aaaagtaaatrtagaaatcat

SEQ ID NO: 5951 - DNA, 21 bp, Homo sapiens
tcatgtataartttgtgtcat

SEQ ID NO: 5952 - DNA, 21 bp, Homo sapiens
ctcattttctkaaacagtcaa

SEQ ID NO: 5953 - DNA, 21 bp, Homo sapiens
tctgaccaaargtgtgcatga

SEQ ID NO: 5954 - DNA, 21 bp, Homo sapiens
tcctctcactsagttaatagc

SEQ ID NO: 5955 - DNA, 21 bp, Homo sapiens
aattcactcargaagtattta

SEQ ID NO: 5956 - DNA, 21 bp, Homo sapiens
gtgtggaagaraccatacatt

SEQ ID NO: 5957 - DNA, 21 bp, Homo sapiens
atagaaatttwggacagtatt

SEQ ID NO: 5958 - DNA, 21 bp, Homo sapiens
tctaagtttaygttttgagac

SEQ ID NO: 5959 - DNA, 21 bp, Homo sapiens
aataattctcyccttcaacat

SEQ ID NO: 5960 - DNA, 21 bp, Homo sapiens
tatggtgttaygtcaattgtt

SEQ ID NO: 5961 - DNA, 21 bp, Homo sapiens
cgctcagactrtctggattca

SEQ ID NO: 5962 - DNA, 21 bp, Homo sapiens
tgaagaaagasagtttgctat

SEQ ID NO: 5963 - DNA, 21 bp, Homo sapiens
aatcccatttrcaaagatcct

SEQ ID NO: 5964 - DNA, 21 bp, Homo sapiens
tagatgatttsataaagactt

SEQ ID NO: 5965 - DNA, 21 bp, Homo sapiens
aagtgaaattktatatgaagt

SEQ ID NO: 5966 - DNA, 21 bp, Homo sapiens
atgatgatgamaaagttgatt

SEQ ID NO: 5967 - DNA, 21 bp, Homo sapiens
agttagggaayaccggatgag

SEQ ID NO: 5968 - DNA, 21 bp, Homo sapiens
aagcagactgygagaattcta

SEQ ID NO: 5969 - DNA, 21 bp, Homo sapiens
acattaaatgycttctgtacc

SEQ ID NO: 5970 - DNA, 21 bp, Homo sapiens
tccgttcattragaaacattt

SEQ ID NO: 5971 - DNA, 21 bp, Homo sapiens
tattgtattcmtttgatacgc

SEQ ID NO: 5972 - DNA, 21 bp, Homo sapiens
acagtttaatyttattttcca

SEQ ID NO: 5973 - DNA, 21 bp, Homo sapiens
taatgaaaatygcttgaaaac

SEQ ID NO: 5974 - DNA, 21 bp, Homo sapiens
aataatatggkaaggttgtga

SEQ ID NO: 5975 - DNA, 21 bp, Homo sapiens
attgaatgaaygattttaata

SEQ ID NO: 5976 - DNA, 21 bp, Homo sapiens
ccttatggcarcttttctgca

SEQ ID NO: 5977 - DNA, 21 bp, Homo sapiens
ctaatggttgrgtagaaagca

SEQ ID NO: 5978 - DNA, 21 bp, Homo sapiens
gaaagtctgcrgataccatgg

SEQ ID NO: 5979 - DNA, 21 bp, Homo sapiens
tgcttcagacrttataaaggc

SEQ ID NO: 5980 - DNA, 21 bp, Homo sapiens
ggacatgggakcaagaggtga

SEQ ID NO: 5981 - DNA, 21 bp, Homo sapiens
cactaactaamcctaatggtt

SEQ ID NO: 5982 - DNA, 21 bp, Homo sapiens
cagcataacayactccaatgg

SEQ ID NO: 5983 - DNA, 21 bp, Homo sapiens
actctttgtaygcccaattga

SEQ ID NO: 5984 - DNA, 21 bp, Homo sapiens
ttttaaacagrtatttgtcga

SEQ ID NO: 5985 - DNA, 21 bp, Homo sapiens
ttgccagcccyagttctctat

SEQ ID NO: 5986 - DNA, 21 bp, Homo sapiens
aaaaaccctarcaatgtgttg

SEQ ID NO: 5987 - DNA, 21 bp, Homo sapiens
gtacaatgtgraggaaagtac

SEQ ID NO: 5988 - DNA, 21 bp, Homo sapiens
tggggaaaagrgattaaaaat

SEQ ID NO: 5989 - DNA, 21 bp, Homo sapiens
gcaaaggagarctaggagggt

SEQ ID NO: 5990 - DNA, 21 bp, Homo sapiens
aacaaagaatraaagtgccag

SEQ ID NO: 5991 - DNA, 21 bp, Homo sapiens
acagctctacrtaatcgggca

SEQ ID NO: 5992 - DNA, 21 bp, Homo sapiens
gctaccctaayagaggcagct

SEQ ID NO: 5993 - DNA, 21 bp, Homo sapiens
ttaaccacaastttgcaaaat

SEQ ID NO: 5994 - DNA, 21 bp, Homo sapiens
agtcttctaamctttcagtcg

SEQ ID NO: 5995 - DNA, 21 bp, Homo sapiens
tttcaagactyggtggaaaga

SEQ ID NO: 5996 - DNA, 21 bp, Homo sapiens
tacctcataawccacccccaa

SEQ ID NO: 5997 - DNA, 21 bp, Homo sapiens
caggacagaarccttttcgag

SEQ ID NO: 5998 - DNA, 21 bp, Homo sapiens
gacaggaggaygggattctcg

SEQ ID NO: 5999 - DNA, 21 bp, Homo sapiens
ggtcttgaggytgagcaaatg

SEQ ID NO: 6000 - DNA, 21 bp, Homo sapiens
ttcctacttaygtattttcca

SEQ ID NO: 6001 - DNA, 21 bp, Homo sapiens
acctgctgtaytgggaagaaa

SEQ ID NO: 6002 - DNA, 21 bp, Homo sapiens
gttgtatcttygttttgaagt

SEQ ID NO: 6003 - DNA, 21 bp, Homo sapiens
gaggcctgaartgctgtatgg

SEQ ID NO: 6004 - DNA, 21 bp, Homo sapiens
ggtaaacttamtattcagtct

SEQ ID NO: 6005 - DNA, 21 bp, Homo sapiens
atatgatgagrtgcataaaag

SEQ ID NO: 6006 - DNA, 21 bp, Homo sapiens
ccaggcccttmtaccttggtc

SEQ ID NO: 6007 - DNA, 21 bp, Homo sapiens
caatctatgarcattatctag

SEQ ID NO: 6008 - DNA, 21 bp, Homo sapiens
tagaaattctrgccaatcttt

SEQ ID NO: 6009 - DNA, 21 bp, Homo sapiens
aaagaaggaaygactagaaag

SEQ ID NO: 6010 - DNA, 21 bp, Homo sapiens
atttttcagtsaatgataatt

SEQ ID NO: 6011 - DNA, 21 bp, Homo sapiens
ttatcaaggtmattttccttt

SEQ ID NO: 6012 - DNA, 21 bp, Homo sapiens
tggcacctgasgaagacagcg

SEQ ID NO: 6013 - DNA, 21 bp, Homo sapiens
caagtacatcmaataagaact

SEQ ID NO: 6014 - DNA, 21 bp, Homo sapiens
ttgagaataarcttcactctg

SEQ ID NO: 6015 - DNA, 21 bp, Homo sapiens
cctttaaaatktaaacactta

SEQ ID NO: 6016 - DNA, 21 bp, Homo sapiens
tttgcttaacytttctcattc

SEQ ID NO: 6017 - DNA, 21 bp, Homo sapiens
ttgtgccataytttcctgcct

SEQ ID NO: 6018 - DNA, 21 bp, Homo sapiens
tctcctaaacsatctctaggg

SEQ ID NO: 6019 - DNA, 21 bp, Homo sapiens
ggaacttactrcaacaaggct

SEQ ID NO: 6020 - DNA, 21 bp, Homo sapiens
gtgaccatttyctcacttaag

SEQ ID NO: 6021 - DNA, 21 bp, Homo sapiens
caacaagtccrtaagagtcaa

SEQ ID NO: 6022 - DNA, 21 bp, Homo sapiens
tctcatacacrgtcttctagc

SEQ ID NO: 6023 - DNA, 21 bp, Homo sapiens
cctgaggctgytgtccttaaa

SEQ ID NO: 6024 - DNA, 21 bp, Homo sapiens
tctatggttgycaccactgct

SEQ ID NO: 6025 - DNA, 21 bp, Homo sapiens
atgcagatgastatggtaatg

SEQ ID NO: 6026 - DNA, 21 bp, Homo sapiens
gggtctccaargaggctttta

SEQ ID NO: 6027 - DNA, 21 bp, Homo sapiens
tgtccaggagsgtgaagcctt

SEQ ID NO: 6028 - DNA, 21 bp, Homo sapiens
gctcaccttayaaggcttata

SEQ ID NO: 6029 - DNA, 21 bp, Homo sapiens
gtctggttttrtgtttgtata

SEQ ID NO: 6030 - DNA, 21 bp, Homo sapiens
tttgcagtttkaaaaaattta

SEQ ID NO: 6031 - DNA, 21 bp, Homo sapiens
ataatgatgtyattcacactc

SEQ ID NO: 6032 - DNA, 21 bp, Homo sapiens
gttgtatgtgyggtaggaaat

SEQ ID NO: 6033 - DNA, 21 bp, Homo sapiens
tgacacctggyaacccaaagt

SEQ ID NO: 6034 - DNA, 21 bp, Homo sapiens
aagtcaacatrgattgcaaag

SEQ ID NO: 6035 - DNA, 21 bp, Homo sapiens
gtgcagtttgytaaagaagtc

SEQ ID NO: 6036 - DNA, 21 bp, Homo sapiens
tgttatctacrttttctgtaa

SEQ ID NO: 6037 - DNA, 21 bp, Homo sapiens
gccacccatcrgacctctcca

SEQ ID NO: 6038 - DNA, 21 bp, Homo sapiens
tcaacagcaayggtagatcca

SEQ ID NO: 6039 - DNA, 21 bp, Homo sapiens
aaaaccttggytctcaaacaa

SEQ ID NO: 6040 - DNA, 21 bp, Homo sapiens
aactggctatraaattttcct

SEQ ID NO: 6041 - DNA, 21 bp, Homo sapiens
ttatcacctcytaaatgctct

SEQ ID NO: 6042 - DNA, 21 bp, Homo sapiens
tattaaacaasgtctatcaat

SEQ ID NO: 6043 - DNA, 21 bp, Homo sapiens
gacaccactargaaaaactga

SEQ ID NO: 6044 - DNA, 21 bp, Homo sapiens
ctacattttayttctctctgg

SEQ ID NO: 6045 - DNA, 21 bp, Homo sapiens
cagaaacggcrtacaagaaaa

SEQ ID NO: 6046 - DNA, 21 bp, Homo sapiens
tatgagtggcyggtcggttac

SEQ ID NO: 6047 - DNA, 21 bp, Homo sapiens
aaaaaaggtaygcattctgaa

SEQ ID NO: 6048 - DNA, 21 bp, Homo sapiens
tatgtgccaastagtagatat

SEQ ID NO: 6049 - DNA, 21 bp, Homo sapiens
ttttggaccayatcattgtat

SEQ ID NO: 6050 - DNA, 21 bp, Homo sapiens
attcattaacytgattatcat

SEQ ID NO: 6051 - DNA, 21 bp, Homo sapiens
tatctattccstttcttaaag

SEQ ID NO: 6052 - DNA, 21 bp, Homo sapiens
attattaaaaygttatcctct

SEQ ID NO: 6053 - DNA, 21 bp, Homo sapiens
ctatgacgtgyttctgaagtt

SEQ ID NO: 6054 - DNA, 21 bp, Homo sapiens
ctattacttcygtcttattct

SEQ ID NO: 6055 - DNA, 21 bp, Homo sapiens
tttatcttttwatcactctga

SEQ ID NO: 6056 - DNA, 21 bp, Homo sapiens
atgaaaggctrcatccacact

SEQ ID NO: 6057 - DNA, 21 bp, Homo sapiens
tgatgagagtrtgcatttagg

SEQ ID NO: 6058 - DNA, 21 bp, Homo sapiens
aacagaaatgytttgccctgc

SEQ ID NO: 6059 - DNA, 21 bp, Homo sapiens
agtatcataayggtagtgtta

SEQ ID NO: 6060 - DNA, 21 bp, Homo sapiens
tgtgtaacaaygttccccttt

SEQ ID NO: 6061 - DNA, 21 bp, Homo sapiens
attggcagtaytaagacaaca

SEQ ID NO: 6062 - DNA, 21 bp, Homo sapiens
ataatagtcamgatgatggtt

SEQ ID NO: 6063 - DNA, 21 bp, Homo sapiens
aagggttcaaraaatgaggaa

SEQ ID NO: 6064 - DNA, 21 bp, Homo sapiens
cacttcaaaamgtgagtccct

SEQ ID NO: 6065 - DNA, 21 bp, Homo sapiens
aaagccagtawatggaacgga

SEQ ID NO: 6066 - DNA, 21 bp, Homo sapiens
tctgctccagyagttctcact

SEQ ID NO: 6067 - DNA, 21 bp, Homo sapiens
tcgtgggaaakagtagttcta

SEQ ID NO: 6068 - DNA, 21 bp, Homo sapiens
gtctgtaaagygatgagacat

SEQ ID NO: 6069 - DNA, 21 bp, Homo sapiens
caatcatctayagagaccgag

SEQ ID NO: 6070 - DNA, 21 bp, Homo sapiens
ctgtcagaacrtaaatttgat

SEQ ID NO: 6071 - DNA, 21 bp, Homo sapiens
gatgccctttscaacacatat

SEQ ID NO: 6072 - DNA, 21 bp, Homo sapiens
acttctgccayaacttggctg

SEQ ID NO: 6073 - DNA, 21 bp, Homo sapiens
ttaagaaatarggaactgaac

SEQ ID NO: 6074 - DNA, 21 bp, Homo sapiens
tagtcccacawaaatctcatt

SEQ ID NO: 6075 - DNA, 21 bp, Homo sapiens
tagtaattgtrgattctagcc

SEQ ID NO: 6076 - DNA, 21 bp, Homo sapiens
tcttcccacartgtccctcct

SEQ ID NO: 6077 - DNA, 21 bp, Homo sapiens
ataggttttamtggaaaatta

SEQ ID NO: 6078 - DNA, 21 bp, Homo sapiens
atttgactgasgaattttgct

SEQ ID NO: 6079 - DNA, 21 bp, Homo sapiens
atttcagtgaygtaaacccct

SEQ ID NO: 6080 - DNA, 21 bp, Homo sapiens
gacaatcaggstcctctgtgg

SEQ ID NO: 6081 - DNA, 21 bp, Homo sapiens
taaggactacrttcagagcct

SEQ ID NO: 6082 - DNA, 21 bp, Homo sapiens
ctggtgtagtrgtctcttaag

SEQ ID NO: 6083 - DNA, 21 bp, Homo sapiens
tatcctgtaayggccagtggg

SEQ ID NO: 6084 - DNA, 21 bp, Homo sapiens
tctcttagtgstatttcctct

SEQ ID NO: 6085 - DNA, 21 bp, Homo sapiens
ttccactattrcccttaattc

SEQ ID NO: 6086 - DNA, 21 bp, Homo sapiens
caggacagcaycagaggcaaa

SEQ ID NO: 6087 - DNA, 21 bp, Homo sapiens
ctcccaaaaarctcaatgtgg

SEQ ID NO: 6088 - DNA, 21 bp, Homo sapiens
gagcaattcartggaggtgaa

SEQ ID NO: 6089 - DNA, 21 bp, Homo sapiens
gcttgattacrtttttcttgt

SEQ ID NO: 6090 - DNA, 21 bp, Homo sapiens
agaaggaggcytcacagtaga

SEQ ID NO: 6091 - DNA, 21 bp, Homo sapiens
aacgtaagagsatataaaaag

SEQ ID NO: 6092 - DNA, 21 bp, Homo sapiens
aaactgtggasaaatttcttt

SEQ ID NO: 6093 - DNA, 21 bp, Homo sapiens
gagccgggccrtgagcgcctg

SEQ ID NO: 6094 - DNA, 21 bp, Homo sapiens
gcattaaaccyttcatgactg

SEQ ID NO: 6095 - DNA, 21 bp, Homo sapiens
catactgagtsttttaatccg

SEQ ID NO: 6096 - DNA, 21 bp, Homo sapiens
ttgactatatwcatgcattct

SEQ ID NO: 6097 - DNA, 21 bp, Homo sapiens
ctgaaataacycctgaggcaa

SEQ ID NO: 6098 - DNA, 21 bp, Homo sapiens
tttatgttctyttgaagatga

SEQ ID NO: 6099 - DNA, 21 bp, Homo sapiens
gtattcactcragatgttagt

SEQ ID NO: 6100 - DNA, 21 bp, Homo sapiens
agaatgttcayagatatttct

SEQ ID NO: 6101 - DNA, 21 bp, Homo sapiens
tggaggatggsatagtaaaga

SEQ ID NO: 6102 - DNA, 21 bp, Homo sapiens
acaattaaatrtacagtggtt

SEQ ID NO: 6103 - DNA, 21 bp, Homo sapiens
tactcagtgtkataagatcat

SEQ ID NO: 6104 - DNA, 21 bp, Homo sapiens
tgattaaaagraattcaagaa

SEQ ID NO: 6105 - DNA, 21 bp, Homo sapiens
gcttgcagagrtactaaacca

SEQ ID NO: 6106 - DNA, 21 bp, Homo sapiens
gaaaactaacmgtttgagggt

SEQ ID NO: 6107 - DNA, 21 bp, Homo sapiens
cttgtcagttyttaaggacag

SEQ ID NO: 6108 - DNA, 21 bp, Homo sapiens
atgattttttmtcaccatgga

SEQ ID NO: 6109 - DNA, 21 bp, Homo sapiens
caacagcttcrtagcaaaagg

SEQ ID NO: 6110 - DNA, 21 bp, Homo sapiens
gtgagcaagtraataaacaag

SEQ ID NO: 6111 - DNA, 21 bp, Homo sapiens
catgtgtctgyaaacatcctt

SEQ ID NO: 6112 - DNA, 21 bp, Homo sapiens
tccgatggctrttccctcaca

SEQ ID NO: 6113 - DNA, 21 bp, Homo sapiens
agaccaagagktccgctgcca

SEQ ID NO: 6114 - DNA, 21 bp, Homo sapiens
gccgctccagmgagtttaatt

SEQ ID NO: 6115 - DNA, 21 bp, Homo sapiens
tactgttgctyatacaaatca

SEQ ID NO: 6116 - DNA, 21 bp, Homo sapiens
acagaacgcgratccgttgga

SEQ ID NO: 6117 - DNA, 21 bp, Homo sapiens
tgggaaaggtrgccttgagct

SEQ ID NO: 6118 - DNA, 21 bp, Homo sapiens
tttgtgtatgkacttcttctc

SEQ ID NO: 6119 - DNA, 21 bp, Homo sapiens
gaggaaaaccraagtcactag

SEQ ID NO: 6120 - DNA, 21 bp, Homo sapiens
caatttttacwgtttttccaa

SEQ ID NO: 6121 - DNA, 21 bp, Homo sapiens
ctgatcacccsaacaaaaagg

SEQ ID NO: 6122 - DNA, 21 bp, Homo sapiens
tattctgtctyttacaagaaa

SEQ ID NO: 6123 - DNA, 21 bp, Homo sapiens
agggaattgtsaacaactgag

SEQ ID NO: 6124 - DNA, 21 bp, Homo sapiens
ttcccttgtaycgttgtggct

SEQ ID NO: 6125 - DNA, 21 bp, Homo sapiens
aaaccttcttrgaaccctagg

SEQ ID NO: 6126 - DNA, 21 bp, Homo sapiens
attgctagacytaatcatcca

SEQ ID NO: 6127 - DNA, 21 bp, Homo sapiens
tcagggctcayaatttctttg

SEQ ID NO: 6128 - DNA, 21 bp, Homo sapiens
cttaaaatatrtagtaagtgc

SEQ ID NO: 6129 - DNA, 21 bp, Homo sapiens
taaactcatgrctcggggctt

SEQ ID NO: 6130 - DNA, 21 bp, Homo sapiens
atataatacayccctgaagtt

SEQ ID NO: 6131 - DNA, 21 bp, Homo sapiens
gtctcataatmataagagagt

SEQ ID NO: 6132 - DNA, 21 bp, Homo sapiens
caaaagtattwaaaaaaatca

SEQ ID NO: 6133 - DNA, 21 bp, Homo sapiens
ttctattttcyagttagactt

SEQ ID NO: 6134 - DNA, 21 bp, Homo sapiens
aaccacaataytatcagtaat

SEQ ID NO: 6135 - DNA, 21 bp, Homo sapiens
tgtgtttttgrttcacatgaa

SEQ ID NO: 6136 - DNA, 21 bp, Homo sapiens
cagttttttgrgaagtagagg

SEQ ID NO: 6137 - DNA, 21 bp, Homo sapiens
tgtattgcagygccaattgct

SEQ ID NO: 6138 - DNA, 21 bp, Homo sapiens
ctggaataacrcctgagatct

SEQ ID NO: 6139 - DNA, 21 bp, Homo sapiens
atttaaacatraaagcatgga

SEQ ID NO: 6140 - DNA, 21 bp, Homo sapiens
aaaacccggamtcatccatag

SEQ ID NO: 6141 - DNA, 21 bp, Homo sapiens
ttcaactcacrtaatgagaag

SEQ ID NO: 6142 - DNA, 21 bp, Homo sapiens
ttgttggataytgaatgacag

SEQ ID NO: 6143 - DNA, 21 bp, Homo sapiens
ctgctttacaygtggtctcag

SEQ ID NO: 6144 - DNA, 21 bp, Homo sapiens
tcttcagtgaygggagatgcc

SEQ ID NO: 6145 - DNA, 21 bp, Homo sapiens
gattaaacacragatatctca

SEQ ID NO: 6146 - DNA, 21 bp, Homo sapiens
aggatggctargtaaaagaca

SEQ ID NO: 6147 - DNA, 21 bp, Homo sapiens
gtatctgaaarcggctatcat

SEQ ID NO: 6148 - DNA, 21 bp, Homo sapiens
atatcccgatsattttaattt

SEQ ID NO: 6149 - DNA, 21 bp, Homo sapiens
accaagggccwgtatatatgc

SEQ ID NO: 6150 - DNA, 21 bp, Homo sapiens
gagatattctrtctttgctac

SEQ ID NO: 6151 - DNA, 21 bp, Homo sapiens
cagcaaatackggagtgactg

SEQ ID NO: 6152 - DNA, 21 bp, Homo sapiens
tgtgatttaastgacgatgaa

SEQ ID NO: 6153 - DNA, 21 bp, Homo sapiens
gcctttccacsaatctttccc

SEQ ID NO: 6154 - DNA, 21 bp, Homo sapiens
caatatgaagktatgcccaca

SEQ ID NO: 6155 - DNA, 21 bp, Homo sapiens
ggctgtcaatratcccccgcc

SEQ ID NO: 6156 - DNA, 21 bp, Homo sapiens
tttgtcagtgytatgggaaag

SEQ ID NO: 6157 - DNA, 21 bp, Homo sapiens
aggtgtctccstgttaaatag

SEQ ID NO: 6158 - DNA, 21 bp, Homo sapiens
aaacaagtagygatgttcaaa

SEQ ID NO: 6159 - DNA, 21 bp, Homo sapiens
gcagatagccmaatgtacaca

SEQ ID NO: 6160 - DNA, 21 bp, Homo sapiens
tttctcttctrggaaaaggca

SEQ ID NO: 6161 - DNA, 21 bp, Homo sapiens
atattctttckcaatgtgttt

SEQ ID NO: 6162 - DNA, 21 bp, Homo sapiens
cctgtatatcytctcagttga

SEQ ID NO: 6163 - DNA, 21 bp, Homo sapiens
cagcatattcwgcagcaacag

SEQ ID NO: 6164 - DNA, 21 bp, Homo sapiens
tgcattttaamttgacacatt

SEQ ID NO: 6165 - DNA, 21 bp, Homo sapiens
tttaatttcayttgcttttga

SEQ ID NO: 6166 - DNA, 21 bp, Homo sapiens
gctcctgctcrgtcaagccca

SEQ ID NO: 6167 - DNA, 21 bp, Homo sapiens
taggaaaattratccagagaa

SEQ ID NO: 6168 - DNA, 21 bp, Homo sapiens
agctgtaacawttcttgggca

SEQ ID NO: 6169 - DNA, 21 bp, Homo sapiens
atgtgctttcytttgtgaaga

SEQ ID NO: 6170 - DNA, 21 bp, Homo sapiens
tcaatctcacrtgaaacattc

SEQ ID NO: 6171 - DNA, 21 bp, Homo sapiens
aaaactctttktagtgtcatt

SEQ ID NO: 6172 - DNA, 21 bp, Homo sapiens
aacaatgtgayacaaactgta

SEQ ID NO: 6173 - DNA, 21 bp, Homo sapiens
caggctgaccratgatcatgc

SEQ ID NO: 6174 - DNA, 21 bp, Homo sapiens
aaaaatgggtrtaaacataga

SEQ ID NO: 6175 - DNA, 21 bp, Homo sapiens
gaaaaggtgaygcaaaaattt

SEQ ID NO: 6176 - DNA, 21 bp, Homo sapiens
tcctcaggccytttcttttcc

SEQ ID NO: 6177 - DNA, 21 bp, Homo sapiens
catagcccaaytactacttga

SEQ ID NO: 6178 - DNA, 21 bp, Homo sapiens
tgtttaaaaayagataataag

SEQ ID NO: 6179 - DNA, 21 bp, Homo sapiens
tatattaaaaygaaatggact

SEQ ID NO: 6180 - DNA, 21 bp, Homo sapiens
atataaagtcytcaaaatttc

SEQ ID NO: 6181 - DNA, 21 bp, Homo sapiens
gtaaagtcttrgaaatgtaaa

SEQ ID NO: 6182 - DNA, 21 bp, Homo sapiens
gtatcccatayagcaagaagt

SEQ ID NO: 6183 - DNA, 21 bp, Homo sapiens
gtgacacagtrtctatactat

SEQ ID NO: 6184 - DNA, 21 bp, Homo sapiens
cttaacttccrgattccacag

SEQ ID NO: 6185 - DNA, 21 bp, Homo sapiens
attcataattmcttatattga

SEQ ID NO: 6186 - DNA, 21 bp, Homo sapiens
tgttgccataycactgtgtag

SEQ ID NO: 6187 - DNA, 21 bp, Homo sapiens
aatttattttytggatgatta

SEQ ID NO: 6188 - DNA, 21 bp, Homo sapiens
ccaacaaaatrgacttacatg

SEQ ID NO: 6189 - DNA, 21 bp, Homo sapiens
ctgttagacaygacacagtct

SEQ ID NO: 6190 - DNA, 21 bp, Homo sapiens
agccatatacrgtcattaaaa

SEQ ID NO: 6191 - DNA, 21 bp, Homo sapiens
gcgacctctcmtaaactttgt

SEQ ID NO: 6192 - DNA, 21 bp, Homo sapiens
aatataaattsgcataatatg

SEQ ID NO: 6193 - DNA, 21 bp, Homo sapiens
caatgatcggmtagtaaagta

SEQ ID NO: 6194 - DNA, 21 bp, Homo sapiens
caagctgaagygagcaactag

SEQ ID NO: 6195 - DNA, 21 bp, Homo sapiens
taaggaattastaggcattta

SEQ ID NO: 6196 - DNA, 21 bp, Homo sapiens
actcaacattrcctaaaaact

SEQ ID NO: 6197 - DNA, 21 bp, Homo sapiens
aaccttagctrgatccatttt

SEQ ID NO: 6198 - DNA, 21 bp, Homo sapiens
tcccataatgwatcagcttca

SEQ ID NO: 6199 - DNA, 21 bp, Homo sapiens
aatcagtgtarttcttggcaa

SEQ ID NO: 6200 - DNA, 21 bp, Homo sapiens
tttaaattgaktaaagttcca

SEQ ID NO: 6201 - DNA, 21 bp, Homo sapiens
tgacacagagrctatttttga

SEQ ID NO: 6202 - DNA, 21 bp, Homo sapiens
ccttacgtgtrtgtagtgcat

SEQ ID NO: 6203 - DNA, 21 bp, Homo sapiens
atggaggagayactaatgaag

SEQ ID NO: 6204 - DNA, 21 bp, Homo sapiens
ttaatttaccytgtctgatac

SEQ ID NO: 6205 - DNA, 21 bp, Homo sapiens
ctgagaactcygggctgtttc

SEQ ID NO: 6206 - DNA, 21 bp, Homo sapiens
ttcagccctgmtctccatttt

SEQ ID NO: 6207 - DNA, 21 bp, Homo sapiens
aaaactcaacwtatggaaggc

SEQ ID NO: 6208 - DNA, 21 bp, Homo sapiens
caatcaggtarcctttaataa

SEQ ID NO: 6209 - DNA, 21 bp, Homo sapiens
aaaggcatcartacagttccc

SEQ ID NO: 6210 - DNA, 21 bp, Homo sapiens
ttacacccacrgcctcaacag

SEQ ID NO: 6211 - DNA, 21 bp, Homo sapiens
cacatgatacyggacagccag

SEQ ID NO: 6212 - DNA, 21 bp, Homo sapiens
gggatctaggwggggaacaag

SEQ ID NO: 6213 - DNA, 21 bp, Homo sapiens
tttctctatasccttcttttt

SEQ ID NO: 6214 - DNA, 21 bp, Homo sapiens
gataactaaayaaaatggttc

SEQ ID NO: 6215 - DNA, 21 bp, Homo sapiens
tgaaggaaaaygatacgcaac

SEQ ID NO: 6216 - DNA, 21 bp, Homo sapiens
tttttcatgtrtaatcccaaa

SEQ ID NO: 6217 - DNA, 21 bp, Homo sapiens
agtaatgctcwttcctgctat

SEQ ID NO: 6218 - DNA, 21 bp, Homo sapiens
atatattggcyatctacattg

SEQ ID NO: 6219 - DNA, 21 bp, Homo sapiens
gctgtatagtrgcaaagcttc

SEQ ID NO: 6220 - DNA, 21 bp, Homo sapiens
tcgtttgatgrctttaacaaa

SEQ ID NO: 6221 - DNA, 21 bp, Homo sapiens
ggtcattttaragactattat

SEQ ID NO: 6222 - DNA, 21 bp, Homo sapiens
gctcctctctyctcaaaggga

SEQ ID NO: 6223 - DNA, 21 bp, Homo sapiens
tgtcgatgttytgaatcacat

SEQ ID NO: 6224 - DNA, 21 bp, Homo sapiens
agaaagtttcraaggggattt

SEQ ID NO: 6225 - DNA, 21 bp, Homo sapiens
ccaacaccatyggctcttctg

SEQ ID NO: 6226 - DNA, 21 bp, Homo sapiens
atgggagcatyttataatgtg

SEQ ID NO: 6227 - DNA, 21 bp, Homo sapiens
gctagaatgcyatggtggatg

SEQ ID NO: 6228 - DNA, 21 bp, Homo sapiens
aaatagcccaygcaattacaa

SEQ ID NO: 6229 - DNA, 21 bp, Homo sapiens
gattactgcawcaattcctag

SEQ ID NO: 6230 - DNA, 21 bp, Homo sapiens
accaatcccgyggacaataag

SEQ ID NO: 6231 - DNA, 21 bp, Homo sapiens
gctcaaatatmacttcattaa

SEQ ID NO: 6232 - DNA, 21 bp, Homo sapiens
ctatcattaawctctccttaa

SEQ ID NO: 6233 - DNA, 21 bp, Homo sapiens
aaaattgaaayccataatgaa

SEQ ID NO: 6234 - DNA, 21 bp, Homo sapiens
atgggatgagytctctcagac

SEQ ID NO: 6235 - DNA, 21 bp, Homo sapiens
caagtctcttsatgcctcttc

SEQ ID NO: 6236 - DNA, 21 bp, Homo sapiens
ctatgtcagcygaaaaataat

SEQ ID NO: 6237 - DNA, 21 bp, Homo sapiens
atgcatgtacrgctgtcaata

SEQ ID NO: 6238 - DNA, 21 bp, Homo sapiens
ttatatgggcrcagaagatgt

SEQ ID NO: 6239 - DNA, 21 bp, Homo sapiens
tggcattatarcctgaaaaaa

SEQ ID NO: 6240 - DNA, 21 bp, Homo sapiens
ctgctgtagtygctccattca

SEQ ID NO: 6241 - DNA, 21 bp, Homo sapiens
ggttaaacagrgaccctaagg

SEQ ID NO: 6242 - DNA, 21 bp, Homo sapiens
tggctctaccyggtgccattt

SEQ ID NO: 6243 - DNA, 21 bp, Homo sapiens
cccaggtgggmtctaatttga

SEQ ID NO: 6244 - DNA, 21 bp, Homo sapiens
agaaggaaaayggaccatggc

SEQ ID NO: 6245 - DNA, 21 bp, Homo sapiens
tctcctaaaamatcatcagag

SEQ ID NO: 6246 - DNA, 21 bp, Homo sapiens
aactggacatyggagcggaat

SEQ ID NO: 6247 - DNA, 21 bp, Homo sapiens
tacgttcttasggatccagcc

SEQ ID NO: 6248 - DNA, 21 bp, Homo sapiens
taataccatcrtcagaaatcc

SEQ ID NO: 6249 - DNA, 21 bp, Homo sapiens
atgaaagctgycttgcctaag

SEQ ID NO: 6250 - DNA, 21 bp, Homo sapiens
ctcacctggaragaaaagctg

SEQ ID NO: 6251 - DNA, 21 bp, Homo sapiens
ctacagcttcratggcagccc

SEQ ID NO: 6252 - DNA, 21 bp, Homo sapiens
tgtccttccartgtaaagtcc

SEQ ID NO: 6253 - DNA, 21 bp, Homo sapiens
ttgaaaactaygcaagtacat

SEQ ID NO: 6254 - DNA, 21 bp, Homo sapiens
tgtggcctttragtaccttgg

SEQ ID NO: 6255 - DNA, 21 bp, Homo sapiens
agcagggctaygttctgagaa

SEQ ID NO: 6256 - DNA, 21 bp, Homo sapiens
tggatatgtcsagtggagctt

SEQ ID NO: 6257 - DNA, 21 bp, Homo sapiens
cccgggtctcrtatgccaaat

SEQ ID NO: 6258 - DNA, 21 bp, Homo sapiens
gtaagttaackaaggtctcca

SEQ ID NO: 6259 - DNA, 21 bp, Homo sapiens
tgggaatagarctgcttcatc

SEQ ID NO: 6260 - DNA, 21 bp, Homo sapiens
tcaggttgttscaatgtccca

SEQ ID NO: 6261 - DNA, 21 bp, Homo sapiens
caaagttatamatctcttaaa

SEQ ID NO: 6262 - DNA, 21 bp, Homo sapiens
gcattacaacrtgtgccaggt

SEQ ID NO: 6263 - DNA, 21 bp, Homo sapiens
caatcggggarcgattcgatt

SEQ ID NO: 6264 - DNA, 21 bp, Homo sapiens
aggacagtttygtaatcagga

SEQ ID NO: 6265 - DNA, 21 bp, Homo sapiens
actggtggccygctaaatccg

SEQ ID NO: 6266 - DNA, 21 bp, Homo sapiens
tcagcagtcasgaaggcacat

SEQ ID NO: 6267 - DNA, 21 bp, Homo sapiens
ttggagctatygactgatttt

SEQ ID NO: 6268 - DNA, 21 bp, Homo sapiens
gccaggctaayaaggtctcag

SEQ ID NO: 6269 - DNA, 21 bp, Homo sapiens
tagacaaaatkttaaagttaa

SEQ ID NO: 6270 - DNA, 21 bp, Homo sapiens
atgatgtgatygggctgtaaa

SEQ ID NO: 6271 - DNA, 21 bp, Homo sapiens
ccccttttgcygtgagagttt

SEQ ID NO: 6272 - DNA, 21 bp, Homo sapiens
aagctgaaccsgaatgtttcc

SEQ ID NO: 6273 - DNA, 21 bp, Homo sapiens
cggaatggggytgatctcagt

SEQ ID NO: 6274 - DNA, 21 bp, Homo sapiens
cccattcaatycacaatagcg

SEQ ID NO: 6275 - DNA, 21 bp, Homo sapiens
tccgaacgtayctttggtgaa

SEQ ID NO: 6276 - DNA, 21 bp, Homo sapiens
tatatatagaytgtatgttac

SEQ ID NO: 6277 - DNA, 21 bp, Homo sapiens
taaatgcacayataaaatcat

SEQ ID NO: 6278 - DNA, 21 bp, Homo sapiens
tgctggacatytcactgttac

SEQ ID NO: 6279 - DNA, 21 bp, Homo sapiens
ggacttgagcyaattacatga

SEQ ID NO: 6280 - DNA, 21 bp, Homo sapiens
gttttgagttraagggacggc

SEQ ID NO: 6281 - DNA, 21 bp, Homo sapiens
ctaaggacagygtatgggatt

SEQ ID NO: 6282 - DNA, 21 bp, Homo sapiens
tcgggcagagwtacccatccc

SEQ ID NO: 6283 - DNA, 21 bp, Homo sapiens
atttgcatcargtccaatctg

SEQ ID NO: 6284 - DNA, 21 bp, Homo sapiens
ggccctgcacktaagtgattt

SEQ ID NO: 6285 - DNA, 21 bp, Homo sapiens
tgtttcaaacygagcaaaaca

SEQ ID NO: 6286 - DNA, 21 bp, Homo sapiens
attgtaaacastaacataact

SEQ ID NO: 6287 - DNA, 21 bp, Homo sapiens
gcaaatagggrtaacagcatt

SEQ ID NO: 6288 - DNA, 21 bp, Homo sapiens
caaatgtttaytgaatactaa

SEQ ID NO: 6289 - DNA, 21 bp, Homo sapiens
atgtttcccamaaagacaatc

SEQ ID NO: 6290 - DNA, 21 bp, Homo sapiens
gtgatgaagaygtccctgcta

SEQ ID NO: 6291 - DNA, 21 bp, Homo sapiens
aactttacttkcagaagaggg

SEQ ID NO: 6292 - DNA, 21 bp, Homo sapiens
caggagctgarcaaacaacat

SEQ ID NO: 6293 - DNA, 21 bp, Homo sapiens
cttccacatcygctattgaag

SEQ ID NO: 6294 - DNA, 21 bp, Homo sapiens
attagaaaacsttattcaaat

SEQ ID NO: 6295 - DNA, 21 bp, Homo sapiens
cttaataaggytgtatcttaa

SEQ ID NO: 6296 - DNA, 21 bp, Homo sapiens
atttattaagygtgacaaaat

SEQ ID NO: 6297 - DNA, 21 bp, Homo sapiens
acttgataagyggcagaaatg

SEQ ID NO: 6298 - DNA, 21 bp, Homo sapiens
gcttagaaagwcatcaaaatt

SEQ ID NO: 6299 - DNA, 21 bp, Homo sapiens
tctcttagtcragtgcaacta

SEQ ID NO: 6300 - DNA, 21 bp, Homo sapiens
agagaaaaacygaaaatttgc

SEQ ID NO: 6301 - DNA, 21 bp, Homo sapiens
gccacctgagrccctccccag

SEQ ID NO: 6302 - DNA, 21 bp, Homo sapiens
gtatactaagycagccatttc

SEQ ID NO: 6303 - DNA, 21 bp, Homo sapiens
ttgtattccamggccaagaat

SEQ ID NO: 6304 - DNA, 21 bp, Homo sapiens
tactaatcccrgatctgttcc

SEQ ID NO: 6305 - DNA, 21 bp, Homo sapiens
tttgaacactrcatgcatttg

SEQ ID NO: 6306 - DNA, 21 bp, Homo sapiens
cccaaagaaaytgccttttat

SEQ ID NO: 6307 - DNA, 21 bp, Homo sapiens
aagttttcatrctctttagca

SEQ ID NO: 6308 - DNA, 21 bp, Homo sapiens
tgggtacaagyatagtgtgcg

SEQ ID NO: 6309 - DNA, 21 bp, Homo sapiens
tcagttacccsaaatttacct

SEQ ID NO: 6310 - DNA, 21 bp, Homo sapiens
ttcctcaacartctgtctgaa

SEQ ID NO: 6311 - DNA, 21 bp, Homo sapiens
aggaaaagagstgtattggga

SEQ ID NO: 6312 - DNA, 21 bp, Homo sapiens
gtgtgcataarcataaaggct

SEQ ID NO: 6313 - DNA, 21 bp, Homo sapiens
gccaaggttcratatacatgt

SEQ ID NO: 6314 - DNA, 21 bp, Homo sapiens
ggaatcactgytttactgagt

SEQ ID NO: 6315 - DNA, 21 bp, Homo sapiens
gatcaatctcyacatatttct

SEQ ID NO: 6316 - DNA, 21 bp, Homo sapiens
tttctatgcartttgatttct

SEQ ID NO: 6317 - DNA, 21 bp, Homo sapiens
ctatgtcttgsaaaatttaaa

SEQ ID NO: 6318 - DNA, 21 bp, Homo sapiens
tacaatataakgagaaatata

SEQ ID NO: 6319 - DNA, 21 bp, Homo sapiens
tgtgacttttsatgatctttt

SEQ ID NO: 6320 - DNA, 21 bp, Homo sapiens
tcaaccctgayatttttctct

SEQ ID NO: 6321 - DNA, 21 bp, Homo sapiens
taggattgaawgtcgcaataa

SEQ ID NO: 6322 - DNA, 21 bp, Homo sapiens
aacagttcaartcagagggag

SEQ ID NO: 6323 - DNA, 21 bp, Homo sapiens
ttttgtaatayaaggtttctt

SEQ ID NO: 6324 - DNA, 21 bp, Homo sapiens
aatcccacaartatttaattt

SEQ ID NO: 6325 - DNA, 21 bp, Homo sapiens
acagggttgcrtgtcactgac

SEQ ID NO: 6326 - DNA, 21 bp, Homo sapiens
tgtagaaatcwgtgtagaaat

SEQ ID NO: 6327 - DNA, 21 bp, Homo sapiens
atacttgtcarattagaattt

SEQ ID NO: 6328 - DNA, 21 bp, Homo sapiens
actcactttasgaatgggaca

SEQ ID NO: 6329 - DNA, 21 bp, Homo sapiens
atatgtaactsatatattcac

SEQ ID NO: 6330 - DNA, 21 bp, Homo sapiens
acaggagggakcgtatgtaca

SEQ ID NO: 6331 - DNA, 21 bp, Homo sapiens
tgagcttatcrgaggccattt

SEQ ID NO: 6332 - DNA, 21 bp, Homo sapiens
gctcaagtgcwtctttttggg

SEQ ID NO: 6333 - DNA, 21 bp, Homo sapiens
ttcccactttygtgattcaag

SEQ ID NO: 6334 - DNA, 21 bp, Homo sapiens
tactccttatkgtagtcattt

SEQ ID NO: 6335 - DNA, 21 bp, Homo sapiens
ataaaatgtcrtggaaccaga

SEQ ID NO: 6336 - DNA, 21 bp, Homo sapiens
taacttaatgmttttaaagag

SEQ ID NO: 6337 - DNA, 21 bp, Homo sapiens
gtaccacatgytaggaggcac

SEQ ID NO: 6338 - DNA, 21 bp, Homo sapiens
gtttatcatawttggtaggta

SEQ ID NO: 6339 - DNA, 21 bp, Homo sapiens
agttgaaaatkttgcgaaagc

SEQ ID NO: 6340 - DNA, 21 bp, Homo sapiens
tgttcatttgwtccatagatt

SEQ ID NO: 6341 - DNA, 21 bp, Homo sapiens
aatatttttcyggatgtatcc

SEQ ID NO: 6342 - DNA, 21 bp, Homo sapiens
tcacacacaarttcacaaagc

SEQ ID NO: 6343 - DNA, 21 bp, Homo sapiens
ggcagtcactwtgaagaacta

SEQ ID NO: 6344 - DNA, 21 bp, Homo sapiens
tcaggaaaatmtacaaaaaag

SEQ ID NO: 6345 - DNA, 21 bp, Homo sapiens
tgtcatgtccytttttgttta

SEQ ID NO: 6346 - DNA, 21 bp, Homo sapiens
gcttttaccgmgtattgtttt

SEQ ID NO: 6347 - DNA, 21 bp, Homo sapiens
ttttcaggaawggattattta

SEQ ID NO: 6348 - DNA, 21 bp, Homo sapiens
atgatttactrtaacataaaa

SEQ ID NO: 6349 - DNA, 21 bp, Homo sapiens
ttgtatttttrtttaacaaaa

SEQ ID NO: 6350 - DNA, 21 bp, Homo sapiens
ttccatcttcstgctcccctg

SEQ ID NO: 6351 - DNA, 21 bp, Homo sapiens
tttactgataytgaaatactc

SEQ ID NO: 6352 - DNA, 21 bp, Homo sapiens
atataaacacwgtctcaaatg

SEQ ID NO: 6353 - DNA, 21 bp, Homo sapiens
tgtcttatttyctacttcttc

SEQ ID NO: 6354 - DNA, 21 bp, Homo sapiens
tgtgcatattscatatatctc

SEQ ID NO: 6355 - DNA, 21 bp, Homo sapiens
tatgcttttaygttgcattgc

SEQ ID NO: 6356 - DNA, 21 bp, Homo sapiens
atggatccttyttcattcgtt

SEQ ID NO: 6357 - DNA, 21 bp, Homo sapiens
gtgtagaagtscatacacaga

SEQ ID NO: 6358 - DNA, 21 bp, Homo sapiens
aagggaatatrtgaggccatg

SEQ ID NO: 6359 - DNA, 21 bp, Homo sapiens
tgggctcaaawgtaagtacac

SEQ ID NO: 6360 - DNA, 21 bp, Homo sapiens
ccacaaagccratagtgatca

SEQ ID NO: 6361 - DNA, 21 bp, Homo sapiens
acgatctctgkaatagcttcc

SEQ ID NO: 6362 - DNA, 21 bp, Homo sapiens
agagataggcragggtaaggt

SEQ ID NO: 6363 - DNA, 21 bp, Homo sapiens
gagaaatcttrccatgtggtg

SEQ ID NO: 6364 - DNA, 21 bp, Homo sapiens
cagcatttgtraggccaggtg

SEQ ID NO: 6365 - DNA, 21 bp, Homo sapiens
ggttttgtcayctgctggaaa

SEQ ID NO: 6366 - DNA, 21 bp, Homo sapiens
tatcagttttrtaagtaagca

SEQ ID NO: 6367 - DNA, 21 bp, Homo sapiens
cttgtggtgaycagcactact

SEQ ID NO: 6368 - DNA, 21 bp, Homo sapiens
tacaactttcytgcatggaga

SEQ ID NO: 6369 - DNA, 21 bp, Homo sapiens
aactgagagcrattgtggcaa

SEQ ID NO: 6370 - DNA, 21 bp, Homo sapiens
atgcatccacwacttgattcc

SEQ ID NO: 6371 - DNA, 21 bp, Homo sapiens
acccttggaargataaaaagc

SEQ ID NO: 6372 - DNA, 21 bp, Homo sapiens
cagatgttgtrtgttctggaa

SEQ ID NO: 6373 - DNA, 21 bp, Homo sapiens
ggttttacagrtaatgagaca

SEQ ID NO: 6374 - DNA, 21 bp, Homo sapiens
tatataccctrgtgactggta

SEQ ID NO: 6375 - DNA, 21 bp, Homo sapiens
aaaatctattygagagcccag

SEQ ID NO: 6376 - DNA, 21 bp, Homo sapiens
ctccttccacygccacaggaa

SEQ ID NO: 6377 - DNA, 21 bp, Homo sapiens
tatttttgtgyatttaatttt

SEQ ID NO: 6378 - DNA, 21 bp, Homo sapiens
cagtctttccytcatactctt

SEQ ID NO: 6379 - DNA, 21 bp, Homo sapiens
ctatcctggasagcctccctc

SEQ ID NO: 6380 - DNA, 21 bp, Homo sapiens
gtgtacccttsttttctatgt

SEQ ID NO: 6381 - DNA, 21 bp, Homo sapiens
tttttgggtayagttcccagg

SEQ ID NO: 6382 - DNA, 21 bp, Homo sapiens
atcaaatcgtmaaaaaaaaag

SEQ ID NO: 6383 - DNA, 21 bp, Homo sapiens
taaaagaaacrtgaaacccca

SEQ ID NO: 6384 - DNA, 21 bp, Homo sapiens
gctaatgaggscgagtcatgt

SEQ ID NO: 6385 - DNA, 21 bp, Homo sapiens
atttggccccyattagtaaca

SEQ ID NO: 6386 - DNA, 21 bp, Homo sapiens
gacagcctggrcactggagag

SEQ ID NO: 6387 - DNA, 21 bp, Homo sapiens
ataacagtgtstgacaaatgg

SEQ ID NO: 6388 - DNA, 21 bp, Homo sapiens
gctggttcagrcattttctct

SEQ ID NO: 6389 - DNA, 21 bp, Homo sapiens
ttatttgaggrgctccccacc

SEQ ID NO: 6390 - DNA, 21 bp, Homo sapiens
tcggagtggaygtggacttac

SEQ ID NO: 6391 - DNA, 21 bp, Homo sapiens
ctgtccagtgkgccccatgtg

SEQ ID NO: 6392 - DNA, 21 bp, Homo sapiens
ggaaaaacacrcagcctgttt

SEQ ID NO: 6393 - DNA, 21 bp, Homo sapiens
aataggatggrtatctgcccg

SEQ ID NO: 6394 - DNA, 21 bp, Homo sapiens
gaggcgtgagracaaaaggaa

SEQ ID NO: 6395 - DNA, 21 bp, Homo sapiens
gcattgttaaygttcatcatc

SEQ ID NO: 6396 - DNA, 21 bp, Homo sapiens
ttggcaggagrcaaagtcctg

SEQ ID NO: 6397 - DNA, 21 bp, Homo sapiens
gatcacagaayacctgaatgc

SEQ ID NO: 6398 - DNA, 21 bp, Homo sapiens
cctcagagatktcacagtaga

SEQ ID NO: 6399 - DNA, 21 bp, Homo sapiens
tatcttcttgsacccaatata

SEQ ID NO: 6400 - DNA, 21 bp, Homo sapiens
acagcattagktttgaaaaat

SEQ ID NO: 6401 - DNA, 21 bp, Homo sapiens
ctgaaacgcastttttaagat

SEQ ID NO: 6402 - DNA, 21 bp, Homo sapiens
atataattgcyggggacatac

SEQ ID NO: 6403 - DNA, 21 bp, Homo sapiens
aataaatcacmaagtatgagt

SEQ ID NO: 6404 - DNA, 21 bp, Homo sapiens
acaaaaaatartaacagcagc

SEQ ID NO: 6405 - DNA, 21 bp, Homo sapiens
ggcccagacgmtgccatcatt

SEQ ID NO: 6406 - DNA, 21 bp, Homo sapiens
tgtttattackttggaccgca

SEQ ID NO: 6407 - DNA, 21 bp, Homo sapiens
taaccgcgccsttcattctgt

SEQ ID NO: 6408 - DNA, 21 bp, Homo sapiens
cttagttgcawtccgatatgc

SEQ ID NO: 6409 - DNA, 21 bp, Homo sapiens
tggtttaagcytttgagctct

SEQ ID NO: 6410 - DNA, 21 bp, Homo sapiens
tgctaaatacscgctgttggc

SEQ ID NO: 6411 - DNA, 21 bp, Homo sapiens
gtggccattayttgagagtga

SEQ ID NO: 6412 - DNA, 21 bp, Homo sapiens
gctaagtgacrgatacatggg

SEQ ID NO: 6413 - DNA, 21 bp, Homo sapiens
ccaggtgaaargcccagcgct

SEQ ID NO: 6414 - DNA, 21 bp, Homo sapiens
ctaccccattstgcagtgaaa

SEQ ID NO: 6415 - DNA, 21 bp, Homo sapiens
ggacttgcttyagccttacac

SEQ ID NO: 6416 - DNA, 21 bp, Homo sapiens
catgttaaaarttcagaggaa

SEQ ID NO: 6417 - DNA, 21 bp, Homo sapiens
ccaagtcatgyctcgaggtga

SEQ ID NO: 6418 - DNA, 21 bp, Homo sapiens
agagatgcatwcacaaataaa

SEQ ID NO: 6419 - DNA, 21 bp, Homo sapiens
ctaggtgttcrctaccacaaa

SEQ ID NO: 6420 - DNA, 21 bp, Homo sapiens
gaaatctaaaygaaaacgtga

SEQ ID NO: 6421 - DNA, 21 bp, Homo sapiens
aaatctaactstgtctctatg

SEQ ID NO: 6422 - DNA, 21 bp, Homo sapiens
cagcgtagagycaaccctcca

SEQ ID NO: 6423 - DNA, 21 bp, Homo sapiens
cttactatgcrtcagacacca

SEQ ID NO: 6424 - DNA, 21 bp, Homo sapiens
attttgggtaraatccccttt

SEQ ID NO: 6425 - DNA, 21 bp, Homo sapiens
ctaaaaatagytttgagtagt

SEQ ID NO: 6426 - DNA, 21 bp, Homo sapiens
ggatggcaaartgttttattt

SEQ ID NO: 6427 - DNA, 21 bp, Homo sapiens
tcactcaaatwatgagcccaa

SEQ ID NO: 6428 - DNA, 21 bp, Homo sapiens
tttataatgaygtttttacca

SEQ ID NO: 6429 - DNA, 21 bp, Homo sapiens
tcttttctgakactacggaag

SEQ ID NO: 6430 - DNA, 21 bp, Homo sapiens
ctctctcttamgctctaatga

SEQ ID NO: 6431 - DNA, 21 bp, Homo sapiens
atctcccactrtctccatttg

SEQ ID NO: 6432 - DNA, 21 bp, Homo sapiens
cccaggtccarttggggaaat

SEQ ID NO: 6433 - DNA, 21 bp, Homo sapiens
aaaatgttaargggaataaaa

SEQ ID NO: 6434 - DNA, 21 bp, Homo sapiens
tatagttatcygcaacttact

SEQ ID NO: 6435 - DNA, 21 bp, Homo sapiens
gtaatacgtgygtagtggtat

SEQ ID NO: 6436 - DNA, 21 bp, Homo sapiens
agtgagatttkgtagtgtttc

SEQ ID NO: 6437 - DNA, 21 bp, Homo sapiens
ccattccaagsaaactccatt

SEQ ID NO: 6438 - DNA, 21 bp, Homo sapiens
accacaagtcygataaggctt

SEQ ID NO: 6439 - DNA, 21 bp, Homo sapiens
ggtggccacaytgtactagac

SEQ ID NO: 6440 - DNA, 21 bp, Homo sapiens
tgaagttttayacacagttct

SEQ ID NO: 6441 - DNA, 21 bp, Homo sapiens
gtcactcaggkttattacgct

SEQ ID NO: 6442 - DNA, 21 bp, Homo sapiens
atagccaagcytcattttcct

SEQ ID NO: 6443 - DNA, 21 bp, Homo sapiens
tgcttgcgttrttatcagtgt

SEQ ID NO: 6444 - DNA, 21 bp, Homo sapiens
cacaaggaatrgcaagaagag

SEQ ID NO: 6445 - DNA, 21 bp, Homo sapiens
ttttactgcawtattaactat

SEQ ID NO: 6446 - DNA, 21 bp, Homo sapiens
gatgacttacytaacagatat

SEQ ID NO: 6447 - DNA, 21 bp, Homo sapiens
aaagcacattygtagattata

SEQ ID NO: 6448 - DNA, 21 bp, Homo sapiens
ccataatattyctctagttcc

SEQ ID NO: 6449 - DNA, 21 bp, Homo sapiens
atctatgctgwtttagaggaa

SEQ ID NO: 6450 - DNA, 21 bp, Homo sapiens
tacaactttcrcctatgctaa

SEQ ID NO: 6451 - DNA, 21 bp, Homo sapiens
aattttattgwatttattctc

SEQ ID NO: 6452 - DNA, 21 bp, Homo sapiens
attattttctrttttacaagt

SEQ ID NO: 6453 - DNA, 21 bp, Homo sapiens
tttttgttccmtgatactatt

SEQ ID NO: 6454 - DNA, 21 bp, Homo sapiens
agacaagactrcttcattttt

SEQ ID NO: 6455 - DNA, 21 bp, Homo sapiens
atttttaggarctttcatttt

SEQ ID NO: 6456 - DNA, 21 bp, Homo sapiens
agcaagttacrtttttatcaa

SEQ ID NO: 6457 - DNA, 21 bp, Homo sapiens
cgcaggagtgmacctgttttc

SEQ ID NO: 6458 - DNA, 21 bp, Homo sapiens
gttccaaaagsaagcttatgt

SEQ ID NO: 6459 - DNA, 21 bp, Homo sapiens
agtttagtgarctcaaggtga

SEQ ID NO: 6460 - DNA, 21 bp, Homo sapiens
tcctggaattmatcatgagac

SEQ ID NO: 6461 - DNA, 21 bp, Homo sapiens
aagcacaattygaagcactgg

SEQ ID NO: 6462 - DNA, 21 bp, Homo sapiens
tcaaagcatgyagtgaaggga

SEQ ID NO: 6463 - DNA, 21 bp, Homo sapiens
tcatgatgttragggaaatat

SEQ ID NO: 6464 - DNA, 21 bp, Homo sapiens
atacatttgtwttttttcaat

SEQ ID NO: 6465 - DNA, 21 bp, Homo sapiens
cacaaactgarcttactttac

SEQ ID NO: 6466 - DNA, 21 bp, Homo sapiens
agccttcattmttaatgtttg

SEQ ID NO: 6467 - DNA, 21 bp, Homo sapiens
agtctaattaytattgtagac

SEQ ID NO: 6468 - DNA, 21 bp, Homo sapiens
gtctattaacktaataagcca

SEQ ID NO: 6469 - DNA, 21 bp, Homo sapiens
ggaggattttygcctataaaa

SEQ ID NO: 6470 - DNA, 21 bp, Homo sapiens
ttgtattacarctgttttaaa

SEQ ID NO: 6471 - DNA, 21 bp, Homo sapiens
gtagcctccawattttgttca

SEQ ID NO: 6472 - DNA, 21 bp, Homo sapiens
tgttctcgacyttgtttctgc

SEQ ID NO: 6473 - DNA, 21 bp, Homo sapiens
tctggggactrccttgagtca

SEQ ID NO: 6474 - DNA, 21 bp, Homo sapiens
ttattaactaytcaaatactc

SEQ ID NO: 6475 - DNA, 21 bp, Homo sapiens
attgaactttstgtcttttaa

SEQ ID NO: 6476 - DNA, 21 bp, Homo sapiens
atggtccctcrtcacgctgtg

SEQ ID NO: 6477 - DNA, 21 bp, Homo sapiens
gtcaccaaaayttttatccag

SEQ ID NO: 6478 - DNA, 21 bp, Homo sapiens
gcatatttcaygaatgcccct

SEQ ID NO: 6479 - DNA, 21 bp, Homo sapiens
atacaagaagrgaactgttat

SEQ ID NO: 6480 - DNA, 21 bp, Homo sapiens
caaatgcaccrttacataggc

SEQ ID NO: 6481 - DNA, 21 bp, Homo sapiens
tgatttggttyaaataagact

SEQ ID NO: 6482 - DNA, 21 bp, Homo sapiens
agtttccatgyacaactaaat

SEQ ID NO: 6483 - DNA, 21 bp, Homo sapiens
ctacagtgtayttcacccaaa

SEQ ID NO: 6484 - DNA, 21 bp, Homo sapiens
cgtcattcttmcttaaaagca

SEQ ID NO: 6485 - DNA, 21 bp, Homo sapiens
caagaacattkatgatccctt

SEQ ID NO: 6486 - DNA, 21 bp, Homo sapiens
gcagaaaccayctagacttgt

SEQ ID NO: 6487 - DNA, 21 bp, Homo sapiens
ttggattgatkaaacttaggg

SEQ ID NO: 6488 - DNA, 21 bp, Homo sapiens
aaatactaggrcagttaagaa

SEQ ID NO: 6489 - DNA, 21 bp, Homo sapiens
gtgaactgatwaactttgcag

SEQ ID NO: 6490 - DNA, 21 bp, Homo sapiens
tcacatttcamactttatctt

SEQ ID NO: 6491 - DNA, 21 bp, Homo sapiens
aaacaggagtkgtgacttttc

SEQ ID NO: 6492 - DNA, 21 bp, Homo sapiens
atatataatastcattaatag

SEQ ID NO: 6493 - DNA, 21 bp, Homo sapiens
atcaaagtcamtagaatatga

SEQ ID NO: 6494 - DNA, 21 bp, Homo sapiens
tctaacatttrtctttgagag

SEQ ID NO: 6495 - DNA, 21 bp, Homo sapiens
aatactatttrtcttatttat

SEQ ID NO: 6496 - DNA, 21 bp, Homo sapiens
caagctaattktcttccttat

SEQ ID NO: 6497 - DNA, 21 bp, Homo sapiens
tgtaaacttaygttctcacaa

SEQ ID NO: 6498 - DNA, 21 bp, Homo sapiens
attgggtcatmtctaatataa

SEQ ID NO: 6499 - DNA, 21 bp, Homo sapiens
ggaagagtacmctatgggcca

SEQ ID NO: 6500 - DNA, 21 bp, Homo sapiens
ccttccaatastttgcaattg

SEQ ID NO: 6501 - DNA, 21 bp, Homo sapiens
tatagtaacartaatgtataa

SEQ ID NO: 6502 - DNA, 21 bp, Homo sapiens
tgcctgaaatyatgccttgtt

SEQ ID NO: 6503 - DNA, 21 bp, Homo sapiens
ctgttttcaarttataatttc

SEQ ID NO: 6504 - DNA, 21 bp, Homo sapiens
gtcaccaaatsgtagttgttt

SEQ ID NO: 6505 - DNA, 21 bp, Homo sapiens
gtcttctacayttccttttgt

SEQ ID NO: 6506 - DNA, 21 bp, Homo sapiens
tgtgaggtcarttggttaacc

SEQ ID NO: 6507 - DNA, 21 bp, Homo sapiens
catatatatcyggtcttggca

SEQ ID NO: 6508 - DNA, 21 bp, Homo sapiens
cttgagacccyaaaacagtat

SEQ ID NO: 6509 - DNA, 21 bp, Homo sapiens
tagacttactraaattatacc

SEQ ID NO: 6510 - DNA, 21 bp, Homo sapiens
atcccattttrtaacattgta

SEQ ID NO: 6511 - DNA, 21 bp, Homo sapiens
atcctctaagkagaatatttg

SEQ ID NO: 6512 - DNA, 21 bp, Homo sapiens
ccctgaatgartgaagctata

SEQ ID NO: 6513 - DNA, 21 bp, Homo sapiens
tagaacattcstccaataatg

SEQ ID NO: 6514 - DNA, 21 bp, Homo sapiens
attaaacaagytgccccaatt

SEQ ID NO: 6515 - DNA, 21 bp, Homo sapiens
aatatattctwtcttttaaat

SEQ ID NO: 6516 - DNA, 21 bp, Homo sapiens
agtgtccccarccataaattt

SEQ ID NO: 6517 - DNA, 21 bp, Homo sapiens
aggaatcacayttttaaaaat

SEQ ID NO: 6518 - DNA, 21 bp, Homo sapiens
tttttattgcstttatttttc

SEQ ID NO: 6519 - DNA, 21 bp, Homo sapiens
gaactgtatayctaacaggta

SEQ ID NO: 6520 - DNA, 21 bp, Homo sapiens
ctaggaaagtsgtcttattca

SEQ ID NO: 6521 - DNA, 21 bp, Homo sapiens
atactgttttycaggtagcta

SEQ ID NO: 6522 - DNA, 21 bp, Homo sapiens
ggatcataacrtgctatttcc

SEQ ID NO: 6523 - DNA, 21 bp, Homo sapiens
aactggaagtscatgcgattc

SEQ ID NO: 6524 - DNA, 21 bp, Homo sapiens
tgtattggttktctcaagaat

SEQ ID NO: 6525 - DNA, 21 bp, Homo sapiens
agccaatgaawtaatctatca

SEQ ID NO: 6526 - DNA, 21 bp, Homo sapiens
gctaccatacratcgatatcc

SEQ ID NO: 6527 - DNA, 21 bp, Homo sapiens
tagtgttgtcytgtagcatag

SEQ ID NO: 6528 - DNA, 21 bp, Homo sapiens
atcccctttaracctcaagaa

SEQ ID NO: 6529 - DNA, 21 bp, Homo sapiens
aatcgcacctktatttctggc

SEQ ID NO: 6530 - DNA, 21 bp, Homo sapiens
ctacaaaaaawctaaaggaat

SEQ ID NO: 6531 - DNA, 21 bp, Homo sapiens
ataaatgaaaytgtcaagata

SEQ ID NO: 6532 - DNA, 21 bp, Homo sapiens
gataggtttgycatcacagag

SEQ ID NO: 6533 - DNA, 21 bp, Homo sapiens
ccagttacgcrgtggttactt

SEQ ID NO: 6534 - DNA, 21 bp, Homo sapiens
aactgaaaackgcaattgtca

SEQ ID NO: 6535 - DNA, 21 bp, Homo sapiens
atgccgtcagstaaacataat

SEQ ID NO: 6536 - DNA, 21 bp, Homo sapiens
atcataaatgyattgttactg

SEQ ID NO: 6537 - DNA, 21 bp, Homo sapiens
ttggtctctcyggaggcagga

SEQ ID NO: 6538 - DNA, 21 bp, Homo sapiens
ctatacttctscaatacaatt

SEQ ID NO: 6539 - DNA, 21 bp, Homo sapiens
tatttaacatrtcacaaaatg

SEQ ID NO: 6540 - DNA, 21 bp, Homo sapiens
tagatatatamatgttagacg

SEQ ID NO: 6541 - DNA, 21 bp, Homo sapiens
ctctcactaaygttgaaatgt

SEQ ID NO: 6542 - DNA, 21 bp, Homo sapiens
tatcagaatartatcagatct

SEQ ID NO: 6543 - DNA, 21 bp, Homo sapiens
ttagagcagartatgcatgca

SEQ ID NO: 6544 - DNA, 21 bp, Homo sapiens
ctcaaagttgyttacttacta

SEQ ID NO: 6545 - DNA, 21 bp, Homo sapiens
caggtgtatarcatgaactta

SEQ ID NO: 6546 - DNA, 21 bp, Homo sapiens
tcaaatcaatyagacaaatac

SEQ ID NO: 6547 - DNA, 21 bp, Homo sapiens
tattgatttascattaatcat

SEQ ID NO: 6548 - DNA, 21 bp, Homo sapiens
gtgtgtgaaayttgcaaaata

SEQ ID NO: 6549 - DNA, 21 bp, Homo sapiens
cacattaaagwtctgatctga

SEQ ID NO: 6550 - DNA, 21 bp, Homo sapiens
aaacagttaaktcaggattct

SEQ ID NO: 6551 - DNA, 21 bp, Homo sapiens
tatgatgacarctgtgataat

SEQ ID NO: 6552 - DNA, 21 bp, Homo sapiens
ctacctttacwaacttgctct

SEQ ID NO: 6553 - DNA, 21 bp, Homo sapiens
gaacacatatygactgtattt

SEQ ID NO: 6554 - DNA, 21 bp, Homo sapiens
cagctgtcctrtgatatcagc

SEQ ID NO: 6555 - DNA, 21 bp, Homo sapiens
actctgcacaygttgctgcta

SEQ ID NO: 6556 - DNA, 21 bp, Homo sapiens
taacagcaaarggttcttcaa

SEQ ID NO: 6557 - DNA, 21 bp, Homo sapiens
ttaatgcttayactaaattct

SEQ ID NO: 6558 - DNA, 21 bp, Homo sapiens
gtgaacagaaytgtatttttg

SEQ ID NO: 6559 - DNA, 21 bp, Homo sapiens
caattgctatraaagcatcat

SEQ ID NO: 6560 - DNA, 21 bp, Homo sapiens
tccgtgctctktgctggaggc

SEQ ID NO: 6561 - DNA, 21 bp, Homo sapiens
acagaagtctrttgaacagga

SEQ ID NO: 6562 - DNA, 21 bp, Homo sapiens
gtttttagacyctcctctgtg

SEQ ID NO: 6563 - DNA, 21 bp, Homo sapiens
gctaagtaagytgatattcct

SEQ ID NO: 6564 - DNA, 21 bp, Homo sapiens
agttgaggacmatgtttcaaa

SEQ ID NO: 6565 - DNA, 21 bp, Homo sapiens
tcttaagtaaygaaaagatta

SEQ ID NO: 6566 - DNA, 21 bp, Homo sapiens
atctaatgggraaatttgaag

SEQ ID NO: 6567 - DNA, 21 bp, Homo sapiens
agcttctgaawtagggatttt

SEQ ID NO: 6568 - DNA, 21 bp, Homo sapiens
actcagctctsttggtgcagc

SEQ ID NO: 6569 - DNA, 21 bp, Homo sapiens
aaacagagackgaggaaatct

SEQ ID NO: 6570 - DNA, 21 bp, Homo sapiens
cagctataaamacatttgctt

SEQ ID NO: 6571 - DNA, 21 bp, Homo sapiens
ctgctctattkcctgttacta

SEQ ID NO: 6572 - DNA, 21 bp, Homo sapiens
gattttctgayaacaatgaat

SEQ ID NO: 6573 - DNA, 21 bp, Homo sapiens
ggtctatacawcggaaaaaag

SEQ ID NO: 6574 - DNA, 21 bp, Homo sapiens
tctgataattmctcttgcaat

SEQ ID NO: 6575 - DNA, 21 bp, Homo sapiens
aaaaagactaygtaaaaaata

SEQ ID NO: 6576 - DNA, 21 bp, Homo sapiens
ccttgttgtcyaccgtttgct

SEQ ID NO: 6577 - DNA, 21 bp, Homo sapiens
ataagcctccrttgaaaagat

SEQ ID NO: 6578 - DNA, 21 bp, Homo sapiens
ctggtactaawctacacaatg

SEQ ID NO: 6579 - DNA, 21 bp, Homo sapiens
aattggtgacrttaaagttaa

SEQ ID NO: 6580 - DNA, 21 bp, Homo sapiens
acagaggcaamggtgactgag

SEQ ID NO: 6581 - DNA, 21 bp, Homo sapiens
tgctttccttyactggcactt

SEQ ID NO: 6582 - DNA, 21 bp, Homo sapiens
gcttatttcawccatgatgga

SEQ ID NO: 6583 - DNA, 21 bp, Homo sapiens
aaaatgaagarctatcactta

SEQ ID NO: 6584 - DNA, 21 bp, Homo sapiens
tggcttgatgkggtcaattcc

SEQ ID NO: 6585 - DNA, 21 bp, Homo sapiens
aagaaaatggycctttgtcta

SEQ ID NO: 6586 - DNA, 21 bp, Homo sapiens
tgtgagtgccratttatctca

SEQ ID NO: 6587 - DNA, 21 bp, Homo sapiens
aacttacttcyccatcagttg

SEQ ID NO: 6588 - DNA, 21 bp, Homo sapiens
atttcagttcmcattcaaagt

SEQ ID NO: 6589 - DNA, 21 bp, Homo sapiens
atcaatatttrcccagtgcaa

SEQ ID NO: 6590 - DNA, 21 bp, Homo sapiens
caggtgccaaygtaaacctag

SEQ ID NO: 6591 - DNA, 21 bp, Homo sapiens
gactcttcacrgatttctgga

SEQ ID NO: 6592 - DNA, 21 bp, Homo sapiens
tatgtaaatcygttataatac

SEQ ID NO: 6593 - DNA, 21 bp, Homo sapiens
caatataagcrtgacttaatt

SEQ ID NO: 6594 - DNA, 21 bp, Homo sapiens
atgtaataagscagtaattga

SEQ ID NO: 6595 - DNA, 21 bp, Homo sapiens
cattatatttsaattatttgg

SEQ ID NO: 6596 - DNA, 21 bp, Homo sapiens
ggtgtttcgtrttctactggt

SEQ ID NO: 6597 - DNA, 21 bp, Homo sapiens
cttttagatcrtgacagacct

SEQ ID NO: 6598 - DNA, 21 bp, Homo sapiens
tcttccaccartgaaaagtca

SEQ ID NO: 6599 - DNA, 21 bp, Homo sapiens
ccactattacygatgtgaaaa

SEQ ID NO: 6600 - DNA, 21 bp, Homo sapiens
ctaaaataaamtgtcccaata

SEQ ID NO: 6601 - DNA, 21 bp, Homo sapiens
tatttattgascactagagta

SEQ ID NO: 6602 - DNA, 21 bp, Homo sapiens
ataaatatctracaacaggtt

SEQ ID NO: 6603 - DNA, 21 bp, Homo sapiens
ataagtaagtraaataaacgt

SEQ ID NO: 6604 - DNA, 21 bp, Homo sapiens
aggttcttagwgatgcttcta

SEQ ID NO: 6605 - DNA, 21 bp, Homo sapiens
gtataccaaargaagcttaat

SEQ ID NO: 6606 - DNA, 21 bp, Homo sapiens
atctctggctracaggaagag

SEQ ID NO: 6607 - DNA, 21 bp, Homo sapiens
agccatgttcytaatacccaa

SEQ ID NO: 6608 - DNA, 21 bp, Homo sapiens
cactaaatatyagccatggac

SEQ ID NO: 6609 - DNA, 21 bp, Homo sapiens
tcatgctctastctaagcttc

SEQ ID NO: 6610 - DNA, 21 bp, Homo sapiens
cacttgaggcrcatagcaagc

SEQ ID NO: 6611 - DNA, 21 bp, Homo sapiens
tgtccaactarttactaaatt

SEQ ID NO: 6612 - DNA, 21 bp, Homo sapiens
ggaagcacagwtgtattagcc

SEQ ID NO: 6613 - DNA, 21 bp, Homo sapiens
gtctattctgmagcctgtgaa

SEQ ID NO: 6614 - DNA, 21 bp, Homo sapiens
tttacctttaygtgcttcctt

SEQ ID NO: 6615 - DNA, 21 bp, Homo sapiens
ccctgcagccstaagtaccac

SEQ ID NO: 6616 - DNA, 21 bp, Homo sapiens
atcatatctcygcttggtgct

SEQ ID NO: 6617 - DNA, 21 bp, Homo sapiens
aatctatcagytcacttttca

SEQ ID NO: 6618 - DNA, 21 bp, Homo sapiens
ttacttcttakaaacgtgtat

SEQ ID NO: 6619 - DNA, 21 bp, Homo sapiens
ttctagagacrttgaatccag

SEQ ID NO: 6620 - DNA, 21 bp, Homo sapiens
aaaattggatygaagtccaga

SEQ ID NO: 6621 - DNA, 21 bp, Homo sapiens
atgtcttaatytttctcctct

SEQ ID NO: 6622 - DNA, 21 bp, Homo sapiens
ttcaaattcarttaggccttc

SEQ ID NO: 6623 - DNA, 21 bp, Homo sapiens
ctggttgaaasctagacattt

SEQ ID NO: 6624 - DNA, 21 bp, Homo sapiens
gcaaaccactkcaaggaagct

SEQ ID NO: 6625 - DNA, 21 bp, Homo sapiens
aaatatgaacwttcaataaag

SEQ ID NO: 6626 - DNA, 21 bp, Homo sapiens
tgtcaacattmcccttgcaga

SEQ ID NO: 6627 - DNA, 21 bp, Homo sapiens
gagacactgtyaagttaaata

SEQ ID NO: 6628 - DNA, 21 bp, Homo sapiens
aagcattcgcycttgtgcttc

SEQ ID NO: 6629 - DNA, 21 bp, Homo sapiens
gacttctacartcaatttgta

SEQ ID NO: 6630 - DNA, 21 bp, Homo sapiens
tcttcagggaygcctcctgta

SEQ ID NO: 6631 - DNA, 21 bp, Homo sapiens
tcagctcatgyctgagtccct

SEQ ID NO: 6632 - DNA, 21 bp, Homo sapiens
tacctaccgaytatcaattaa

SEQ ID NO: 6633 - DNA, 21 bp, Homo sapiens
acgtcctttgstcatacagtt

SEQ ID NO: 6634 - DNA, 21 bp, Homo sapiens
cgatcaatacratcttcaaac

SEQ ID NO: 6635 - DNA, 21 bp, Homo sapiens
gatagccctgmagaatcctgg

SEQ ID NO: 6636 - DNA, 21 bp, Homo sapiens
aggagtcagaygtatattcta

SEQ ID NO: 6637 - DNA, 21 bp, Homo sapiens
atcagctattsaactttttct

SEQ ID NO: 6638 - DNA, 21 bp, Homo sapiens
atttgtacttmtatctatgag

SEQ ID NO: 6639 - DNA, 21 bp, Homo sapiens
aaaatgctacstgtaaaattg

SEQ ID NO: 6640 - DNA, 21 bp, Homo sapiens
ggaatagatgyctagtcccaa

SEQ ID NO: 6641 - DNA, 21 bp, Homo sapiens
atagcaggctrcagatacaga

SEQ ID NO: 6642 - DNA, 21 bp, Homo sapiens
gagtggcaccragaggaatgt

SEQ ID NO: 6643 - DNA, 21 bp, Homo sapiens
atagtaatggwcaagctccca

SEQ ID NO: 6644 - DNA, 21 bp, Homo sapiens
attaagatgcmtatgtggcta

SEQ ID NO: 6645 - DNA, 21 bp, Homo sapiens
tcacaataaaytctcattccc

SEQ ID NO: 6646 - DNA, 21 bp, Homo sapiens
ggtgggacagygatccatgtt

SEQ ID NO: 6647 - DNA, 21 bp, Homo sapiens
tccgagttcawatctaacttg

SEQ ID NO: 6648 - DNA, 21 bp, Homo sapiens
actgattagartgtcagaata

SEQ ID NO: 6649 - DNA, 21 bp, Homo sapiens
ttgataaccaytgtatttctg

SEQ ID NO: 6650 - DNA, 21 bp, Homo sapiens
acttgaattcrcaaaatactc

SEQ ID NO: 6651 - DNA, 21 bp, Homo sapiens
gagaatttccrtactacctcc

SEQ ID NO: 6652 - DNA, 21 bp, Homo sapiens
cactccgtagrtgaccataga

SEQ ID NO: 6653 - DNA, 21 bp, Homo sapiens
ctctttaagcrtgtcaactag

SEQ ID NO: 6654 - DNA, 21 bp, Homo sapiens
ctgctcaatamatgtagaagg

SEQ ID NO: 6655 - DNA, 21 bp, Homo sapiens
actctgctaartgtatttcat

SEQ ID NO: 6656 - DNA, 21 bp, Homo sapiens
ctggataagartaattgaaag

SEQ ID NO: 6657 - DNA, 21 bp, Homo sapiens
atggcaaagaratattgttca

SEQ ID NO: 6658 - DNA, 21 bp, Homo sapiens
tcactaaatcrtaacaaaagt

SEQ ID NO: 6659 - DNA, 21 bp, Homo sapiens
gcagaaacagwaatttcagaa

SEQ ID NO: 6660 - DNA, 21 bp, Homo sapiens
ttttgctgcckcttcatgtcg

SEQ ID NO: 6661 - DNA, 21 bp, Homo sapiens
gtcagacatcrgtgcaaagaa

SEQ ID NO: 6662 - DNA, 21 bp, Homo sapiens
acacgccaaawtattaactgt

SEQ ID NO: 6663 - DNA, 21 bp, Homo sapiens
tggccaagtgygtgccctttt

SEQ ID NO: 6664 - DNA, 21 bp, Homo sapiens
ctacgtaaaaygagcttctga

SEQ ID NO: 6665 - DNA, 21 bp, Homo sapiens
gaggagatagytaagatgact

SEQ ID NO: 6666 - DNA, 21 bp, Homo sapiens
gttctggcttygggatggagt

SEQ ID NO: 6667 - DNA, 21 bp, Homo sapiens
tagtgtttacrtcatggtgtc

SEQ ID NO: 6668 - DNA, 21 bp, Homo sapiens
gctgtcagccratatgggtca

SEQ ID NO: 6669 - DNA, 21 bp, Homo sapiens
atcgtttctgragcctgattt

SEQ ID NO: 6670 - DNA, 21 bp, Homo sapiens
atattctgcgygctgctcttc

SEQ ID NO: 6671 - DNA, 21 bp, Homo sapiens
catcaacggcwcttaccgcac

SEQ ID NO: 6672 - DNA, 21 bp, Homo sapiens
catttattatyagcaggcaac

SEQ ID NO: 6673 - DNA, 21 bp, Homo sapiens
aatgcacaaarcagctcacat

SEQ ID NO: 6674 - DNA, 21 bp, Homo sapiens
gtcttggcttractaggacat

SEQ ID NO: 6675 - DNA, 21 bp, Homo sapiens
ttcagaggccrtactgacttc

SEQ ID NO: 6676 - DNA, 21 bp, Homo sapiens
tttagatgtasattaagaccc

SEQ ID NO: 6677 - DNA, 21 bp, Homo sapiens
agaagtccccrgtggctcagg

SEQ ID NO: 6678 - DNA, 21 bp, Homo sapiens
ctatctcttayattgcccagt

SEQ ID NO: 6679 - DNA, 21 bp, Homo sapiens
ttgtcagatgstcttcacaca

SEQ ID NO: 6680 - DNA, 21 bp, Homo sapiens
tgaggtcatgygtagtaaaca

SEQ ID NO: 6681 - DNA, 21 bp, Homo sapiens
ttttagaagtrtgctcattta

SEQ ID NO: 6682 - DNA, 21 bp, Homo sapiens
acatgtcaccragagaaaatg

SEQ ID NO: 6683 - DNA, 21 bp, Homo sapiens
tatgtgacatrgagcgtcagt

SEQ ID NO: 6684 - DNA, 21 bp, Homo sapiens
taacatacttyacttgtaata

SEQ ID NO: 6685 - DNA, 21 bp, Homo sapiens
tttacctaaayttgaggagaa

SEQ ID NO: 6686 - DNA, 21 bp, Homo sapiens
ttcccctgccrcgaatttctt

SEQ ID NO: 6687 - DNA, 21 bp, Homo sapiens
tgcttcagtayataatctaaa

SEQ ID NO: 6688 - DNA, 21 bp, Homo sapiens
agtttattttycagataaaat

SEQ ID NO: 6689 - DNA, 21 bp, Homo sapiens
ccaaggtttaygtaaaataag

SEQ ID NO: 6690 - DNA, 21 bp, Homo sapiens
tctctaaaagmaatataaaat

SEQ ID NO: 6691 - DNA, 21 bp, Homo sapiens
gtgctgccacygtccttttgg

SEQ ID NO: 6692 - DNA, 21 bp, Homo sapiens
ttgactgaagrtaggtttcat

SEQ ID NO: 6693 - DNA, 21 bp, Homo sapiens
tctgaaccccrattccatggt

SEQ ID NO: 6694 - DNA, 21 bp, Homo sapiens
cttcaataaaygggcaggtaa

SEQ ID NO: 6695 - DNA, 21 bp, Homo sapiens
aaggactgctygactatttta

SEQ ID NO: 6696 - DNA, 21 bp, Homo sapiens
tgctgaaaaakattccttata

SEQ ID NO: 6697 - DNA, 21 bp, Homo sapiens
attgaaggccyctggaaagag

SEQ ID NO: 6698 - DNA, 21 bp, Homo sapiens
ttccatgaacyctgctccagt

SEQ ID NO: 6699 - DNA, 21 bp, Homo sapiens
gaagaactttscagaagtagt

SEQ ID NO: 6700 - DNA, 21 bp, Homo sapiens
agtagaacatraggtcataat

SEQ ID NO: 6701 - DNA, 21 bp, Homo sapiens
aaacttatttyagttattgat

SEQ ID NO: 6702 - DNA, 21 bp, Homo sapiens
ttgatacagaytagagccaca

SEQ ID NO: 6703 - DNA, 21 bp, Homo sapiens
ttttaaatctkgctattttat

SEQ ID NO: 6704 - DNA, 21 bp, Homo sapiens
attgtagaggytttagatcat

SEQ ID NO: 6705 - DNA, 21 bp, Homo sapiens
tcaaaatgttrgaactataca

SEQ ID NO: 6706 - DNA, 21 bp, Homo sapiens
ggtttcaggamaatatcagaa

SEQ ID NO: 6707 - DNA, 21 bp, Homo sapiens
acaggtgcacrgccctgagtc

SEQ ID NO: 6708 - DNA, 21 bp, Homo sapiens
aaatgagaatygcatagtgct

SEQ ID NO: 6709 - DNA, 21 bp, Homo sapiens
tttattctccyaatatactta

SEQ ID NO: 6710 - DNA, 21 bp, Homo sapiens
ggatagccacrgtctaagcat

SEQ ID NO: 6711 - DNA, 21 bp, Homo sapiens
gaaacaagtgrgagtcagagt

SEQ ID NO: 6712 - DNA, 21 bp, Homo sapiens
ggtgcctttgmctttgggaag

SEQ ID NO: 6713 - DNA, 21 bp, Homo sapiens
aaaatttagckttcccaagtc

SEQ ID NO: 6714 - DNA, 21 bp, Homo sapiens
ggcgagcaccrgctgaccccc

SEQ ID NO: 6715 - DNA, 21 bp, Homo sapiens
gttcccacacygcagggatca

SEQ ID NO: 6716 - DNA, 21 bp, Homo sapiens
gctgtattttsagaagtacaa

SEQ ID NO: 6717 - DNA, 21 bp, Homo sapiens
tgaataatttycacatgactt

SEQ ID NO: 6718 - DNA, 21 bp, Homo sapiens
ggggaggaccytgcctctttc

SEQ ID NO: 6719 - DNA, 21 bp, Homo sapiens
acttctaactygtgggttcat

SEQ ID NO: 6720 - DNA, 21 bp, Homo sapiens
acattgagccycgagtcaagg

SEQ ID NO: 6721 - DNA, 21 bp, Homo sapiens
tgcatcgatckggtgagacac

SEQ ID NO: 6722 - DNA, 21 bp, Homo sapiens
tgatataccaygcaacattat

SEQ ID NO: 6723 - DNA, 21 bp, Homo sapiens
ttatagtgggygatgtgtaaa

SEQ ID NO: 6724 - DNA, 21 bp, Homo sapiens
ttcttgcctawcctattttaa

SEQ ID NO: 6725 - DNA, 21 bp, Homo sapiens
acaatgggtgrctttatttat

SEQ ID NO: 6726 - DNA, 21 bp, Homo sapiens
tgaaaattcarcttgttcaag

SEQ ID NO: 6727 - DNA, 21 bp, Homo sapiens
ttttgtttttrttatttgtta

SEQ ID NO: 6728 - DNA, 21 bp, Homo sapiens
atctctgagtscagcagtaac

SEQ ID NO: 6729 - DNA, 21 bp, Homo sapiens
tctgcctcgtwtggtttctgc

SEQ ID NO: 6730 - DNA, 21 bp, Homo sapiens
ttaaaaaggtyattcctaccc

SEQ ID NO: 6731 - DNA, 21 bp, Homo sapiens
tctgtttttcyccagcagaag

SEQ ID NO: 6732 - DNA, 21 bp, Homo sapiens
atgtgacagtytctagttccc

SEQ ID NO: 6733 - DNA, 21 bp, Homo sapiens
aggaatttgartgaatgggca

SEQ ID NO: 6734 - DNA, 21 bp, Homo sapiens
ttgcctaagtrtttagaaagt

SEQ ID NO: 6735 - DNA, 21 bp, Homo sapiens
aagaatcaaascccagtgaat

SEQ ID NO: 6736 - DNA, 21 bp, Homo sapiens
tataggaaatrttggcaattt

SEQ ID NO: 6737 - DNA, 21 bp, Homo sapiens
ctcagcaacaygggaagacat

SEQ ID NO: 6738 - DNA, 21 bp, Homo sapiens
ttgtacagtcyaagttccttc

SEQ ID NO: 6739 - DNA, 21 bp, Homo sapiens
gttaggaatayaggattctat

SEQ ID NO: 6740 - DNA, 21 bp, Homo sapiens
tttacctgctytttgattttc

SEQ ID NO: 6741 - DNA, 21 bp, Homo sapiens
ttagccaataratttcctact

SEQ ID NO: 6742 - DNA, 21 bp, Homo sapiens
aagaaaaattraaagaaccaa

SEQ ID NO: 6743 - DNA, 21 bp, Homo sapiens
acatagtacakaatgaatcct

SEQ ID NO: 6744 - DNA, 21 bp, Homo sapiens
gtattaagacrtaaatgggat

SEQ ID NO: 6745 - DNA, 21 bp, Homo sapiens
aggaattaatrctatcttcag

SEQ ID NO: 6746 - DNA, 21 bp, Homo sapiens
gcaaagcctgycagggtgagc

SEQ ID NO: 6747 - DNA, 21 bp, Homo sapiens
tcctaaaactscttgataaaa

SEQ ID NO: 6748 - DNA, 21 bp, Homo sapiens
tatggccccarttggcaaagc

SEQ ID NO: 6749 - DNA, 21 bp, Homo sapiens
atttatctgastgaagaatgg

SEQ ID NO: 6750 - DNA, 21 bp, Homo sapiens
tcagaggcatyccagagcatg

SEQ ID NO: 6751 - DNA, 21 bp, Homo sapiens
aaaaggagcaytctaaacgca

SEQ ID NO: 6752 - DNA, 21 bp, Homo sapiens
acctgcaagtsgaatgggttg

SEQ ID NO: 6753 - DNA, 21 bp, Homo sapiens
aatgccctgasagtttgcaga

SEQ ID NO: 6754 - DNA, 21 bp, Homo sapiens
cgtacaagggmgtttgagaga

SEQ ID NO: 6755 - DNA, 21 bp, Homo sapiens
tatggggcctstaacaatgac

SEQ ID NO: 6756 - DNA, 21 bp, Homo sapiens
tggagataccygcacttgctt

SEQ ID NO: 6757 - DNA, 21 bp, Homo sapiens
ggggtgtgatrcagtgcattg

SEQ ID NO: 6758 - DNA, 21 bp, Homo sapiens
tccaggcgggragttctgtgc

SEQ ID NO: 6759 - DNA, 21 bp, Homo sapiens
gagagaagacrcaggacctga

SEQ ID NO: 6760 - DNA, 21 bp, Homo sapiens
acgagctgcamgtgactaatc

SEQ ID NO: 6761 - DNA, 21 bp, Homo sapiens
tggggtgtccygagcccaact

SEQ ID NO: 6762 - DNA, 21 bp, Homo sapiens
cctgggctgamccaatgagca

SEQ ID NO: 6763 - DNA, 21 bp, Homo sapiens
ggtgcccgctscttcccgttc

SEQ ID NO: 6764 - DNA, 21 bp, Homo sapiens
tgtgccctaaygcagccctcg

SEQ ID NO: 6765 - DNA, 21 bp, Homo sapiens
gcttcgtgaargtaggtattc

SEQ ID NO: 6766 - DNA, 21 bp, Homo sapiens
cttctttccarttaaaatatt

SEQ ID NO: 6767 - DNA, 21 bp, Homo sapiens
acacagaagtyatcactcaca

SEQ ID NO: 6768 - DNA, 21 bp, Homo sapiens
gcaatttcccratgcgggcca

SEQ ID NO: 6769 - DNA, 21 bp, Homo sapiens
agtaaagggasaaagttcttc

SEQ ID NO: 6770 - DNA, 21 bp, Homo sapiens
ggctatattawaaactaatac

SEQ ID NO: 6771 - DNA, 21 bp, Homo sapiens
cccgctgccgmattgttaggt

SEQ ID NO: 6772 - DNA, 21 bp, Homo sapiens
aatgaccacasggctgctgtc

SEQ ID NO: 6773 - DNA, 21 bp, Homo sapiens
gactattactrtatccatttt

SEQ ID NO: 6774 - DNA, 21 bp, Homo sapiens
taaatctgtgrctgaaatctt

SEQ ID NO: 6775 - DNA, 21 bp, Homo sapiens
ccatcatgggygtggccacag

SEQ ID NO: 6776 - DNA, 21 bp, Homo sapiens
tggaaacctcraagctacatc

SEQ ID NO: 6777 - DNA, 21 bp, Homo sapiens
tttcaaatacrtctctgaccc

SEQ ID NO: 6778 - DNA, 21 bp, Homo sapiens
cctctgctttytaagggacat

SEQ ID NO: 6779 - DNA, 21 bp, Homo sapiens
gtcctgattarcctaattctt

SEQ ID NO: 6780 - DNA, 21 bp, Homo sapiens
ggactgatcgrtgccagcact

SEQ ID NO: 6781 - DNA, 21 bp, Homo sapiens
tactagagaamcttgtcccct

SEQ ID NO: 6782 - DNA, 21 bp, Homo sapiens
aaaattgtttyttcatgaggt

SEQ ID NO: 6783 - DNA, 21 bp, Homo sapiens
tatctacacaragctatgggt

SEQ ID NO: 6784 - DNA, 21 bp, Homo sapiens
ttcacagggartctcctatgc

SEQ ID NO: 6785 - DNA, 21 bp, Homo sapiens
actgataaccrgtcattgcca

SEQ ID NO: 6786 - DNA, 21 bp, Homo sapiens
ttaaatttctycgcagcttca

SEQ ID NO: 6787 - DNA, 21 bp, Homo sapiens
tgttgctcacscttatctgga

SEQ ID NO: 6788 - DNA, 21 bp, Homo sapiens
tgaggctgagrtgtgtcccgt

SEQ ID NO: 6789 - DNA, 21 bp, Homo sapiens
atctctgttaytgattggcag

SEQ ID NO: 6790 - DNA, 21 bp, Homo sapiens
tcttcagtcgygtacatgatt

SEQ ID NO: 6791 - DNA, 21 bp, Homo sapiens
cctggtcgggygccctggcat

SEQ ID NO: 6792 - DNA, 21 bp, Homo sapiens
tcaacagctckaagtttgtct

SEQ ID NO: 6793 - DNA, 21 bp, Homo sapiens
ttacgattacraaggatgaaa

SEQ ID NO: 6794 - DNA, 21 bp, Homo sapiens
acaatacagcmtggaatttga

SEQ ID NO: 6795 - DNA, 21 bp, Homo sapiens
tgttttatgcyatatcatttc

SEQ ID NO: 6796 - DNA, 21 bp, Homo sapiens
ctaatgaagtrtgtaaacctc

SEQ ID NO: 6797 - DNA, 21 bp, Homo sapiens
gatatcacggyggatgagagt

SEQ ID NO: 6798 - DNA, 21 bp, Homo sapiens
tccaaatcctyggcccgacat

SEQ ID NO: 6799 - DNA, 21 bp, Homo sapiens
gttccagggamgtgctgctga

SEQ ID NO: 6800 - DNA, 21 bp, Homo sapiens
tgggcgggtgmagcagccacc

SEQ ID NO: 6801 - DNA, 21 bp, Homo sapiens
tccctggcctwttgtaaataa

SEQ ID NO: 6802 - DNA, 21 bp, Homo sapiens
ccacacaagcygcatggccaa

SEQ ID NO: 6803 - DNA, 21 bp, Homo sapiens
gtgctaatccygcagagctgc

SEQ ID NO: 6804 - DNA, 21 bp, Homo sapiens
ttcgcatggtyccatttcctt

SEQ ID NO: 6805 - DNA, 21 bp, Homo sapiens
aaagatgtgamtacccagcag

SEQ ID NO: 6806 - DNA, 21 bp, Homo sapiens
tgtgaagcttyctgagaatgt

SEQ ID NO: 6807 - DNA, 21 bp, Homo sapiens
ggtggaatgaygggaggctca

SEQ ID NO: 6808 - DNA, 21 bp, Homo sapiens
caaattttaaycctatgcaat

SEQ ID NO: 6809 - DNA, 21 bp, Homo sapiens
ggtctctttcrtaagaaacag

SEQ ID NO: 6810 - DNA, 21 bp, Homo sapiens
attggaacctrctatacacat

SEQ ID NO: 6811 - DNA, 21 bp, Homo sapiens
taacagcagtygtataaattt

SEQ ID NO: 6812 - DNA, 21 bp, Homo sapiens
gcctggtacamcctacatgat

SEQ ID NO: 6813 - DNA, 21 bp, Homo sapiens
agctacctgaygtctggctca

SEQ ID NO: 6814 - DNA, 21 bp, Homo sapiens
tgtgatttgcyacccatggga

SEQ ID NO: 6815 - DNA, 21 bp, Homo sapiens
acgtttggggmtcacttaaca

SEQ ID NO: 6816 - DNA, 21 bp, Homo sapiens
gtacactgctyttggaaactg

SEQ ID NO: 6817 - DNA, 21 bp, Homo sapiens
aagaaaaccaraaatctagtc

SEQ ID NO: 6818 - DNA, 21 bp, Homo sapiens
taaacgcctgytgtttgaagg

SEQ ID NO: 6819 - DNA, 21 bp, Homo sapiens
tggggaggtargtgtgggggc

SEQ ID NO: 6820 - DNA, 21 bp, Homo sapiens
tctctgtcctyggcgtgggag

SEQ ID NO: 6821 - DNA, 21 bp, Homo sapiens
ccaacgctccrcctgcatggc

SEQ ID NO: 6822 - DNA, 21 bp, Homo sapiens
gaagatcagcrttcagaccag

SEQ ID NO: 6823 - DNA, 21 bp, Homo sapiens
caggagaggcrgctgctgaat

SEQ ID NO: 6824 - DNA, 21 bp, Homo sapiens
cccaccacagrtgggtagctg

SEQ ID NO: 6825 - DNA, 21 bp, Homo sapiens
ccaggcctccyccacacattc

SEQ ID NO: 6826 - DNA, 21 bp, Homo sapiens
agacccagagrctcacgctca

SEQ ID NO: 6827 - DNA, 21 bp, Homo sapiens
gctgccgcgcmacctctgaca

SEQ ID NO: 6828 - DNA, 21 bp, Homo sapiens
atacatttctyggagtttgat

SEQ ID NO: 6829 - DNA, 21 bp, Homo sapiens
gtgaggcccaygaggggcccc

SEQ ID NO: 6830 - DNA, 21 bp, Homo sapiens
ctctgtttgaygctatgatga

SEQ ID NO: 6831 - DNA, 21 bp, Homo sapiens
ccatcttgccrctggtgacgt

SEQ ID NO: 6832 - DNA, 21 bp, Homo sapiens
cggaggccccrgtgctgggtg

SEQ ID NO: 6833 - DNA, 21 bp, Homo sapiens
ctaagaaccartatcccttat

SEQ ID NO: 6834 - DNA, 21 bp, Homo sapiens
actccacaccrtgagaacagg

SEQ ID NO: 6835 - DNA, 21 bp, Homo sapiens
gatgaaaatgyagttatacca

SEQ ID NO: 6836 - DNA, 21 bp, Homo sapiens
aggtcatgcaygtccacactt

SEQ ID NO: 6837 - DNA, 21 bp, Homo sapiens
aattaggggcrtaacaataac

SEQ ID NO: 6838 - DNA, 21 bp, Homo sapiens
ctctttatgcmaagaggcact

SEQ ID NO: 6839 - DNA, 21 bp, Homo sapiens
acggaggaagsctgtggctcc

SEQ ID NO: 6840 - DNA, 21 bp, Homo sapiens
cctctcacctkcagcccctga

SEQ ID NO: 6841 - DNA, 21 bp, Homo sapiens
aagagcaggargagtttctga

SEQ ID NO: 6842 - DNA, 21 bp, Homo sapiens
aggagtaggasaatggtaaca

SEQ ID NO: 6843 - DNA, 21 bp, Homo sapiens
ggctgcacccygtcctggcac

SEQ ID NO: 6844 - DNA, 21 bp, Homo sapiens
actccaggccrctgccctagt

SEQ ID NO: 6845 - DNA, 21 bp, Homo sapiens
ttgcattcccsctaatttgag

SEQ ID NO: 6846 - DNA, 21 bp, Homo sapiens
aaattatttaygtgatttcat

SEQ ID NO: 6847 - DNA, 21 bp, Homo sapiens
caacaaaaatrcatttcaaat

SEQ ID NO: 6848 - DNA, 21 bp, Homo sapiens
ccacagctaayaccataatga

SEQ ID NO: 6849 - DNA, 21 bp, Homo sapiens
gtgtgtgtggktgtgagttgt

SEQ ID NO: 6850 - DNA, 21 bp, Homo sapiens
tttgcccgagyttaaaattaa

SEQ ID NO: 6851 - DNA, 21 bp, Homo sapiens
gtgaaaatgaycacagggtgc

SEQ ID NO: 6852 - DNA, 21 bp, Homo sapiens
ctgtgctatgwagggacagga

SEQ ID NO: 6853 - DNA, 21 bp, Homo sapiens
tagtgttttcytacgattctt

SEQ ID NO: 6854 - DNA, 21 bp, Homo sapiens
cccaaacgtamgtgctggaat

SEQ ID NO: 6855 - DNA, 21 bp, Homo sapiens
gtctccgcatrgacaagacgg

SEQ ID NO: 6856 - DNA, 21 bp, Homo sapiens
tgtaaatcccrgtgccctggg

SEQ ID NO: 6857 - DNA, 21 bp, Homo sapiens
tgtcccctctrcaagggacaa

SEQ ID NO: 6858 - DNA, 21 bp, Homo sapiens
aggcacaatgwgggcagcaga

SEQ ID NO: 6859 - DNA, 21 bp, Homo sapiens
aagtgaaagcrcactttgact

SEQ ID NO: 6860 - DNA, 21 bp, Homo sapiens
tagtaaaataycttgatgatc

SEQ ID NO: 6861 - DNA, 21 bp, Homo sapiens
atgctgaggakacagagattc

SEQ ID NO: 6862 - DNA, 21 bp, Homo sapiens
ttctgctgtgstctgtagttt

SEQ ID NO: 6863 - DNA, 21 bp, Homo sapiens
cacctcctgcrcatgcctcag

SEQ ID NO: 6864 - DNA, 21 bp, Homo sapiens
gtccctggtcmcggctctggc

SEQ ID NO: 6865 - DNA, 21 bp, Homo sapiens
gagaagcaacmtgtgataatc

SEQ ID NO: 6866 - DNA, 21 bp, Homo sapiens
ggaatccccartgccaacaca

SEQ ID NO: 6867 - DNA, 21 bp, Homo sapiens
ctcactaactkgaggagatgg

SEQ ID NO: 6868 - DNA, 21 bp, Homo sapiens
aatcaattttytgagaaaaac

SEQ ID NO: 6869 - DNA, 21 bp, Homo sapiens
tttccacctgyaatagctgag

SEQ ID NO: 6870 - DNA, 21 bp, Homo sapiens
aaatacaatgsaaggcagggg

SEQ ID NO: 6871 - DNA, 21 bp, Homo sapiens
gaagccacccyggccaggcca

SEQ ID NO: 6872 - DNA, 21 bp, Homo sapiens
ccaggcccacygtgctctcca

SEQ ID NO: 6873 - DNA, 21 bp, Homo sapiens
aattataggcygagtgaggtg

SEQ ID NO: 6874 - DNA, 21 bp, Homo sapiens
tacacgataarataatttcta

SEQ ID NO: 6875 - DNA, 21 bp, Homo sapiens
agccatgaagktgttgactca

SEQ ID NO: 6876 - DNA, 21 bp, Homo sapiens
ttaaaacatayttttgattat

SEQ ID NO: 6877 - DNA, 21 bp, Homo sapiens
gatcaaaggcrtcaaacatag

SEQ ID NO: 6878 - DNA, 21 bp, Homo sapiens
cggctactttmctgaatttat

SEQ ID NO: 6879 - DNA, 21 bp, Homo sapiens
acatcagtggsgatctctgct

SEQ ID NO: 6880 - DNA, 21 bp, Homo sapiens
ttcaggtgctraagaagcact

SEQ ID NO: 6881 - DNA, 21 bp, Homo sapiens
caccagttcartcaccaatgt

SEQ ID NO: 6882 - DNA, 21 bp, Homo sapiens
accttctgtawgttcaagttc

SEQ ID NO: 6883 - DNA, 21 bp, Homo sapiens
caagtgggaayggcagaactg

SEQ ID NO: 6884 - DNA, 21 bp, Homo sapiens
accatgccccrggtcctgtgc

SEQ ID NO: 6885 - DNA, 21 bp, Homo sapiens
atcacttaatmacattcatga

SEQ ID NO: 6886 - DNA, 21 bp, Homo sapiens
aaatttgcctratctggtctc

SEQ ID NO: 6887 - DNA, 21 bp, Homo sapiens
ctattttggaytgctttgatg

SEQ ID NO: 6888 - DNA, 21 bp, Homo sapiens
ttacctacaamcttgaggaag

SEQ ID NO: 6889 - DNA, 21 bp, Homo sapiens
atggaaaacayggaaaggaga

SEQ ID NO: 6890 - DNA, 21 bp, Homo sapiens
aagagtagttrgttgaccagt

SEQ ID NO: 6891 - DNA, 21 bp, Homo sapiens
ttgtttgttcrttcattttcc

SEQ ID NO: 6892 - DNA, 21 bp, Homo sapiens
ggggttatackctctgcttag

SEQ ID NO: 6893 - DNA, 21 bp, Homo sapiens
tacaatacacsctgacattat

SEQ ID NO: 6894 - DNA, 21 bp, Homo sapiens
gctagttgtgrtatagaaaat

SEQ ID NO: 6895 - DNA, 21 bp, Homo sapiens
catgaaagtcrgtctcctcac

SEQ ID NO: 6896 - DNA, 21 bp, Homo sapiens
gtgttcaacaraaagatgtgt

SEQ ID NO: 6897 - DNA, 21 bp, Homo sapiens
tgcacacatayacctacacat

SEQ ID NO: 6898 - DNA, 21 bp, Homo sapiens
ctttgaagctygggaccttaa

SEQ ID NO: 6899 - DNA, 21 bp, Homo sapiens
ttggcgctcasgtttagtagc

SEQ ID NO: 6900 - DNA, 21 bp, Homo sapiens
gaagggaatgyataaacttgt

SEQ ID NO: 6901 - DNA, 21 bp, Homo sapiens
caggagttccrttaagtatca

SEQ ID NO: 6902 - DNA, 21 bp, Homo sapiens
ctcaacacctratacattacc

SEQ ID NO: 6903 - DNA, 21 bp, Homo sapiens
tacagtttgakgtactcttgc

SEQ ID NO: 6904 - DNA, 21 bp, Homo sapiens
ttattccaaakgatgtagtag

SEQ ID NO: 6905 - DNA, 21 bp, Homo sapiens
taaaatcttcstttttggcag

SEQ ID NO: 6906 - DNA, 21 bp, Homo sapiens
ctttccattcyttgactcctc

SEQ ID NO: 6907 - DNA, 21 bp, Homo sapiens
caaccagcagwttatgattta

SEQ ID NO: 6908 - DNA, 21 bp, Homo sapiens
cccctggtttsggagatcatt

SEQ ID NO: 6909 - DNA, 21 bp, Homo sapiens
cagttagcaastttccactta

SEQ ID NO: 6910 - DNA, 21 bp, Homo sapiens
gacagaaatarcaagtactga

SEQ ID NO: 6911 - DNA, 21 bp, Homo sapiens
tgagttaactwgggatactca

SEQ ID NO: 6912 - DNA, 21 bp, Homo sapiens
tcagctcaagrtagattctgt

SEQ ID NO: 6913 - DNA, 21 bp, Homo sapiens
ctgcttaatamacagctaacc

SEQ ID NO: 6914 - DNA, 21 bp, Homo sapiens
aatcatttcaraaaggtatta

SEQ ID NO: 6915 - DNA, 21 bp, Homo sapiens
tggaaaagatrtctaacctcc

SEQ ID NO: 6916 - DNA, 21 bp, Homo sapiens
acattcctgtyagagcactta

SEQ ID NO: 6917 - DNA, 21 bp, Homo sapiens
ggctcactatygtatcttctc

SEQ ID NO: 6918 - DNA, 21 bp, Homo sapiens
cctggaattamtacagttagt

SEQ ID NO: 6919 - DNA, 21 bp, Homo sapiens
agaaagaactrttattaaatt

SEQ ID NO: 6920 - DNA, 21 bp, Homo sapiens
ttataatgctmatccaagcca

SEQ ID NO: 6921 - DNA, 21 bp, Homo sapiens
aaggtgaataraaatgtaact

SEQ ID NO: 6922 - DNA, 21 bp, Homo sapiens
ttgggggcacrtatttgattt

SEQ ID NO: 6923 - DNA, 21 bp, Homo sapiens
aaccagggccwtacttaagat

SEQ ID NO: 6924 - DNA, 21 bp, Homo sapiens
cccaaccagcrtgggcttgca

SEQ ID NO: 6925 - DNA, 21 bp, Homo sapiens
acagtgtcttycctggatatt

SEQ ID NO: 6926 - DNA, 21 bp, Homo sapiens
tagtacagcargagtaacaac

SEQ ID NO: 6927 - DNA, 21 bp, Homo sapiens
aggattgttawgcttcacttg

SEQ ID NO: 6928 - DNA, 21 bp, Homo sapiens
ctatgagggcrtctaacctgt

SEQ ID NO: 6929 - DNA, 21 bp, Homo sapiens
gcgattatagrtatctcctgg

SEQ ID NO: 6930 - DNA, 21 bp, Homo sapiens
tatgtatcagkgctggtttct

SEQ ID NO: 6931 - DNA, 21 bp, Homo sapiens
ctttaaaaaaktatatgcatg

SEQ ID NO: 6932 - DNA, 21 bp, Homo sapiens
ctcatagctaytgccacatgt

SEQ ID NO: 6933 - DNA, 21 bp, Homo sapiens
ctgtggaaatrtaacctttaa

SEQ ID NO: 6934 - DNA, 21 bp, Homo sapiens
acttggcttakttagggaata

SEQ ID NO: 6935 - DNA, 21 bp, Homo sapiens
tggcttccttrctttatcctg

SEQ ID NO: 6936 - DNA, 21 bp, Homo sapiens
gagggatgaaraaaatcttaa

SEQ ID NO: 6937 - DNA, 21 bp, Homo sapiens
cgctgattgtratccaatgca

SEQ ID NO: 6938 - DNA, 21 bp, Homo sapiens
atttatctgayttacctgaac

SEQ ID NO: 6939 - DNA, 21 bp, Homo sapiens
tgggtccctcyagaggaatgt

SEQ ID NO: 6940 - DNA, 21 bp, Homo sapiens
acaaattaagyccaacttgtg

SEQ ID NO: 6941 - DNA, 21 bp, Homo sapiens
actggctgagyggaacctgtc

SEQ ID NO: 6942 - DNA, 21 bp, Homo sapiens
ttcttaattcrtttttctgct

SEQ ID NO: 6943 - DNA, 21 bp, Homo sapiens
taaaatctcasaatattagtc

SEQ ID NO: 6944 - DNA, 21 bp, Homo sapiens
aaattatacartggactccaa

SEQ ID NO: 6945 - DNA, 21 bp, Homo sapiens
aataacaacascatttccaca

SEQ ID NO: 6946 - DNA, 21 bp, Homo sapiens
tccaaaatctyttcccaaaaa

SEQ ID NO: 6947 - DNA, 21 bp, Homo sapiens
ttagtttattkgctatcaaac

SEQ ID NO: 6948 - DNA, 21 bp, Homo sapiens
taataccttgwaactcttttt

SEQ ID NO: 6949 - DNA, 21 bp, Homo sapiens
cagtgcaggawagatttggga

SEQ ID NO: 6950 - DNA, 21 bp, Homo sapiens
tgcagaaataytgtaattaat

SEQ ID NO: 6951 - DNA, 21 bp, Homo sapiens
ttagataccgyggcctaaaaa

SEQ ID NO: 6952 - DNA, 21 bp, Homo sapiens
gaatccggctrctttaggaaa

SEQ ID NO: 6953 - DNA, 21 bp, Homo sapiens
gtgggagtttygtaggaacac

SEQ ID NO: 6954 - DNA, 21 bp, Homo sapiens
ctttgttcagmtatttgtggg

SEQ ID NO: 6955 - DNA, 21 bp, Homo sapiens
ctgttcacctraagttacttt

SEQ ID NO: 6956 - DNA, 21 bp, Homo sapiens
ttttatccttycagtgtttca

SEQ ID NO: 6957 - DNA, 21 bp, Homo sapiens
tttgtagcttwtacagctgtg

SEQ ID NO: 6958 - DNA, 21 bp, Homo sapiens
ttgcttggacrcctctcttcc

SEQ ID NO: 6959 - DNA, 21 bp, Homo sapiens
agtggattccyttctttggag

SEQ ID NO: 6960 - DNA, 21 bp, Homo sapiens
tttatggcagwctcaaaggca

SEQ ID NO: 6961 - DNA, 21 bp, Homo sapiens
gagagcatgaygtaatctttc

SEQ ID NO: 6962 - DNA, 21 bp, Homo sapiens
tctggagaagkttcaaagatg

SEQ ID NO: 6963 - DNA, 21 bp, Homo sapiens
aaagggtaccragaaataagt

SEQ ID NO: 6964 - DNA, 21 bp, Homo sapiens
tctatgtacargtgccagaaa

SEQ ID NO: 6965 - DNA, 21 bp, Homo sapiens
ctacttttccygaaatctctt

SEQ ID NO: 6966 - DNA, 21 bp, Homo sapiens
tcatgaaaatygtacccaagc

SEQ ID NO: 6967 - DNA, 21 bp, Homo sapiens
aaggttacctrtgtttgtttc

SEQ ID NO: 6968 - DNA, 21 bp, Homo sapiens
tatcacagggracacttgaga

SEQ ID NO: 6969 - DNA, 21 bp, Homo sapiens
aacctaaaaastgctatgact

SEQ ID NO: 6970 - DNA, 21 bp, Homo sapiens
agaatccagayaataggcagt

SEQ ID NO: 6971 - DNA, 21 bp, Homo sapiens
catcttgactkttggcatttg

SEQ ID NO: 6972 - DNA, 21 bp, Homo sapiens
tgcttaagtaygactgccata

SEQ ID NO: 6973 - DNA, 21 bp, Homo sapiens
gaggcaagacrtcgtagggca

SEQ ID NO: 6974 - DNA, 21 bp, Homo sapiens
ttttcagcccmgttgggaagt

SEQ ID NO: 6975 - DNA, 21 bp, Homo sapiens
atgaatattgwtaactgccct

SEQ ID NO: 6976 - DNA, 21 bp, Homo sapiens
agagagtcccyttacacacaa

SEQ ID NO: 6977 - DNA, 21 bp, Homo sapiens
ttccttcttcytcccaaattc

SEQ ID NO: 6978 - DNA, 21 bp, Homo sapiens
aatacccttgsccaaccaaag

SEQ ID NO: 6979 - DNA, 21 bp, Homo sapiens
atggagagaayagaggaatgt

SEQ ID NO: 6980 - DNA, 21 bp, Homo sapiens
tggctgacagygcctcagaaa

SEQ ID NO: 6981 - DNA, 21 bp, Homo sapiens
ggaatttttaraacccgtttc

SEQ ID NO: 6982 - DNA, 21 bp, Homo sapiens
caaccatgackctacagcagg

SEQ ID NO: 6983 - DNA, 21 bp, Homo sapiens
acatagaaacrtacatacatt

SEQ ID NO: 6984 - DNA, 21 bp, Homo sapiens
taaatgacaartagtctatgt

SEQ ID NO: 6985 - DNA, 21 bp, Homo sapiens
tggactgaaaytgcaggcaaa

SEQ ID NO: 6986 - DNA, 21 bp, Homo sapiens
caaaagaaacytgaaggatac

SEQ ID NO: 6987 - DNA, 21 bp, Homo sapiens
ttgcagcgtcmtgtctaattg

SEQ ID NO: 6988 - DNA, 21 bp, Homo sapiens
gtgtgtatgcytgggtcagcc

SEQ ID NO: 6989 - DNA, 21 bp, Homo sapiens
ttaatccactrtatccctagc

SEQ ID NO: 6990 - DNA, 21 bp, Homo sapiens
acctgagaaasctgaaatgct

SEQ ID NO: 6991 - DNA, 21 bp, Homo sapiens
accttagctgwtcataagcct

SEQ ID NO: 6992 - DNA, 21 bp, Homo sapiens
gggcttccttkccagcataac

SEQ ID NO: 6993 - DNA, 21 bp, Homo sapiens
gcagcattgarcaaagttgag

SEQ ID NO: 6994 - DNA, 21 bp, Homo sapiens
cttctgcctgsgatttaggac

SEQ ID NO: 6995 - DNA, 21 bp, Homo sapiens
ggccattctascactgtgtat

SEQ ID NO: 6996 - DNA, 21 bp, Homo sapiens
aaaaatcctartgccatttat

SEQ ID NO: 6997 - DNA, 21 bp, Homo sapiens
gctctggcccrgtagaaataa

SEQ ID NO: 6998 - DNA, 21 bp, Homo sapiens
gggtaagaccmaagcagtctg

SEQ ID NO: 6999 - DNA, 21 bp, Homo sapiens
ctgttttacckccacacccaa

SEQ ID NO: 7000 - DNA, 21 bp, Homo sapiens
ttttcccatgkgtcaatttta

SEQ ID NO: 7001 - DNA, 21 bp, Homo sapiens
agacaactctragttccacag

SEQ ID NO: 7002 - DNA, 21 bp, Homo sapiens
ttaggcaagcrtgtggcaccg

SEQ ID NO: 7003 - DNA, 21 bp, Homo sapiens
tactgacttgrcttgaggcca

SEQ ID NO: 7004 - DNA, 21 bp, Homo sapiens
tttttacccarctaggtcatt

SEQ ID NO: 7005 - DNA, 21 bp, Homo sapiens
ttttggaagaytatatagaga

SEQ ID NO: 7006 - DNA, 21 bp, Homo sapiens
atccttgcaarcaaatgacat

SEQ ID NO: 7007 - DNA, 21 bp, Homo sapiens
tcaaaactacsagagggaaaa

SEQ ID NO: 7008 - DNA, 21 bp, Homo sapiens
tagtccaggaracagaatatt

SEQ ID NO: 7009 - DNA, 21 bp, Homo sapiens
taagtcacagmatcttagtat

SEQ ID NO: 7010 - DNA, 21 bp, Homo sapiens
ctcctttttcwaacaaagctc

SEQ ID NO: 7011 - DNA, 21 bp, Homo sapiens
tcaaactctcygatgctgaat

SEQ ID NO: 7012 - DNA, 21 bp, Homo sapiens
tgagttagtamaaacttggtg

SEQ ID NO: 7013 - DNA, 21 bp, Homo sapiens
gggtgcccgaytgagaatcac

SEQ ID NO: 7014 - DNA, 21 bp, Homo sapiens
tgcgctttttscaagtgtgct

SEQ ID NO: 7015 - DNA, 21 bp, Homo sapiens
atgggccttcygtggggagta

SEQ ID NO: 7016 - DNA, 21 bp, Homo sapiens
tagtgactgcytcaaaagtgg

SEQ ID NO: 7017 - DNA, 21 bp, Homo sapiens
aagtgcctacyagatatacag

SEQ ID NO: 7018 - DNA, 21 bp, Homo sapiens
tcagcattttmttgccttaca

SEQ ID NO: 7019 - DNA, 21 bp, Homo sapiens
tggagccagcrgttttagctt

SEQ ID NO: 7020 - DNA, 21 bp, Homo sapiens
tggactgctcrtatttgagtc

SEQ ID NO: 7021 - DNA, 21 bp, Homo sapiens
attttaatgawcctactgaat

SEQ ID NO: 7022 - DNA, 21 bp, Homo sapiens
gcccataaagyatcaagggaa

SEQ ID NO: 7023 - DNA, 21 bp, Homo sapiens
ataattaacarctctgagttt

SEQ ID NO: 7024 - DNA, 21 bp, Homo sapiens
ttaacaccctmctgcttcagg

SEQ ID NO: 7025 - DNA, 21 bp, Homo sapiens
ttctggaatcmactgtgtacc

SEQ ID NO: 7026 - DNA, 21 bp, Homo sapiens
aaaatttttgracaccattgc

SEQ ID NO: 7027 - DNA, 21 bp, Homo sapiens
atgagtccccrttgtgcttga

SEQ ID NO: 7028 - DNA, 21 bp, Homo sapiens
gaaataatggrgcagatgatc

SEQ ID NO: 7029 - DNA, 21 bp, Homo sapiens
ctgagtctagyttattacaaa

SEQ ID NO: 7030 - DNA, 21 bp, Homo sapiens
aaattctgccyaacaatacat

SEQ ID NO: 7031 - DNA, 21 bp, Homo sapiens
atggaaactamcaactacgtc

SEQ ID NO: 7032 - DNA, 21 bp, Homo sapiens
accagcatgtktgtagtcaca

SEQ ID NO: 7033 - DNA, 21 bp, Homo sapiens
atcgggtggcmctatgactgc

SEQ ID NO: 7034 - DNA, 21 bp, Homo sapiens
aaggactttaygcatttgcac

SEQ ID NO: 7035 - DNA, 21 bp, Homo sapiens
tggaagcactycacctctcag

SEQ ID NO: 7036 - DNA, 21 bp, Homo sapiens
ggtcctacacyccaaaaagtt

SEQ ID NO: 7037 - DNA, 21 bp, Homo sapiens
ggaacgtccaygaatggagag

SEQ ID NO: 7038 - DNA, 21 bp, Homo sapiens
ttgtcctctgktttcctatta

SEQ ID NO: 7039 - DNA, 21 bp, Homo sapiens
gagcgtaaaartgttcatagt

SEQ ID NO: 7040 - DNA, 21 bp, Homo sapiens
caaatgctgaktcatcttgtt

SEQ ID NO: 7041 - DNA, 21 bp, Homo sapiens
tgggattcctygctgcagtcc

SEQ ID NO: 7042 - DNA, 21 bp, Homo sapiens
gcatttaccaygtaaccttgc

SEQ ID NO: 7043 - DNA, 21 bp, Homo sapiens
gacatttgaargatgcaccta

SEQ ID NO: 7044 - DNA, 21 bp, Homo sapiens
tttaaagtaargagctcgttg

SEQ ID NO: 7045 - DNA, 21 bp, Homo sapiens
gacccagggcmgagcttactg

SEQ ID NO: 7046 - DNA, 21 bp, Homo sapiens
atcacctaccyttttgaagca

SEQ ID NO: 7047 - DNA, 21 bp, Homo sapiens
tatagggagcygataaaattg

SEQ ID NO: 7048 - DNA, 21 bp, Homo sapiens
atactgttgaygttttgaagt

SEQ ID NO: 7049 - DNA, 21 bp, Homo sapiens
ccatgctccartaaccttctc

SEQ ID NO: 7050 - DNA, 21 bp, Homo sapiens
tattctgtacsgagttcagag

SEQ ID NO: 7051 - DNA, 21 bp, Homo sapiens
caaacatgagratctgattgg

SEQ ID NO: 7052 - DNA, 21 bp, Homo sapiens
ggcttacccayggtctgtcct

SEQ ID NO: 7053 - DNA, 21 bp, Homo sapiens
gacggagagcragacttcttt

SEQ ID NO: 7054 - DNA, 21 bp, Homo sapiens
tcccaagaggmaattgtgggg

SEQ ID NO: 7055 - DNA, 21 bp, Homo sapiens
ggtgttcctcrcaggtggtga

SEQ ID NO: 7056 - DNA, 21 bp, Homo sapiens
agccctctagwtccttgaagt

SEQ ID NO: 7057 - DNA, 21 bp, Homo sapiens
accaacacggyacactcacac

SEQ ID NO: 7058 - DNA, 21 bp, Homo sapiens
cttccgattgractgtccctt

SEQ ID NO: 7059 - DNA, 21 bp, Homo sapiens
taccttccagygccatcagga

SEQ ID NO: 7060 - DNA, 21 bp, Homo sapiens
caaatggggaytgtggaagag

SEQ ID NO: 7061 - DNA, 21 bp, Homo sapiens
ctacacgagayaactgacata

SEQ ID NO: 7062 - DNA, 21 bp, Homo sapiens
aggatctgacmttttgagtca

SEQ ID NO: 7063 - DNA, 21 bp, Homo sapiens
agcagctcttmccctgtggat

SEQ ID NO: 7064 - DNA, 21 bp, Homo sapiens
gaaaatcacaygtgttgtaaa

SEQ ID NO: 7065 - DNA, 21 bp, Homo sapiens
tttttgattgytgattaaatc

SEQ ID NO: 7066 - DNA, 21 bp, Homo sapiens
agggggattastttgccaagg

SEQ ID NO: 7067 - DNA, 21 bp, Homo sapiens
gggaccgaccygaggatgaag

SEQ ID NO: 7068 - DNA, 21 bp, Homo sapiens
ccataccttgkgtgtttgtat

SEQ ID NO: 7069 - DNA, 21 bp, Homo sapiens
ctggacctgcytgtggttctt

SEQ ID NO: 7070 - DNA, 21 bp, Homo sapiens
atgggggtagwttgtaatgag

SEQ ID NO: 7071 - DNA, 21 bp, Homo sapiens
tgtgtggaggycactgcacta

SEQ ID NO: 7072 - DNA, 21 bp, Homo sapiens
caaaaacatcwacggaaaggg

SEQ ID NO: 7073 - DNA, 21 bp, Homo sapiens
cagaacaaggsccactgcaag

SEQ ID NO: 7074 - DNA, 21 bp, Homo sapiens
agcctagaatrtgacctcttg

SEQ ID NO: 7075 - DNA, 21 bp, Homo sapiens
gagtgctgacrgaagttaatg

SEQ ID NO: 7076 - DNA, 21 bp, Homo sapiens
atctacagatkcagggtcggt

SEQ ID NO: 7077 - DNA, 21 bp, Homo sapiens
tccttgggtamaggctttcat

SEQ ID NO: 7078 - DNA, 21 bp, Homo sapiens
aacttgacagractttaagac

SEQ ID NO: 7079 - DNA, 21 bp, Homo sapiens
ttgctgcctgmataacactgg

SEQ ID NO: 7080 - DNA, 21 bp, Homo sapiens
ccgtgaggacytggcattgcc

SEQ ID NO: 7081 - DNA, 21 bp, Homo sapiens
cctgtctatcrctatttctag

SEQ ID NO: 7082 - DNA, 21 bp, Homo sapiens
cgtgcttcctrttagtctcca

SEQ ID NO: 7083 - DNA, 21 bp, Homo sapiens
tgaatgaaggraacacttaaa

SEQ ID NO: 7084 - DNA, 21 bp, Homo sapiens
gctgaatgtcygcctgtccta

SEQ ID NO: 7085 - DNA, 21 bp, Homo sapiens
acattggccaycatctaaact

SEQ ID NO: 7086 - DNA, 21 bp, Homo sapiens
cctctaacaawgactggtatt

SEQ ID NO: 7087 - DNA, 21 bp, Homo sapiens
agactgtggtrtgggtaaaag

SEQ ID NO: 7088 - DNA, 21 bp, Homo sapiens
tattcagtcayagtgtttcca

SEQ ID NO: 7089 - DNA, 21 bp, Homo sapiens
tctttctgccrtgaatttaac

SEQ ID NO: 7090 - DNA, 21 bp, Homo sapiens
cctagggaccrgttcctgaat

SEQ ID NO: 7091 - DNA, 21 bp, Homo sapiens
gttgtgcaatytttttaacgt

SEQ ID NO: 7092 - DNA, 21 bp, Homo sapiens
caggtttttgytcccttttct

SEQ ID NO: 7093 - DNA, 21 bp, Homo sapiens
tccagcaattyctactctaac

SEQ ID NO: 7094 - DNA, 21 bp, Homo sapiens
gtatttctgcrtaggtagaat

SEQ ID NO: 7095 - DNA, 21 bp, Homo sapiens
gatccactcaygggttacaca

SEQ ID NO: 7096 - DNA, 21 bp, Homo sapiens
tacatgtctcmtctgccctgt

SEQ ID NO: 7097 - DNA, 21 bp, Homo sapiens
acaggctatgmagtgtggagt

SEQ ID NO: 7098 - DNA, 21 bp, Homo sapiens
tggatgatgamaaccttttcg

SEQ ID NO: 7099 - DNA, 21 bp, Homo sapiens
agatgattttygcacacattt

SEQ ID NO: 7100 - DNA, 21 bp, Homo sapiens
ggaattttcartgagggtttg

SEQ ID NO: 7101 - DNA, 21 bp, Homo sapiens
cccagttatgmgttagctgct

SEQ ID NO: 7102 - DNA, 21 bp, Homo sapiens
tgtcatttaayagtttgcttt

SEQ ID NO: 7103 - DNA, 21 bp, Homo sapiens
acagctaactyagaaagacag

SEQ ID NO: 7104 - DNA, 21 bp, Homo sapiens
caatttaaacytgacaggtac

SEQ ID NO: 7105 - DNA, 21 bp, Homo sapiens
ggcctcctagmagaagcggag

SEQ ID NO: 7106 - DNA, 21 bp, Homo sapiens
tacgaatttcrcaggttttca

SEQ ID NO: 7107 - DNA, 21 bp, Homo sapiens
ttttaattctrtcatttgtgt

SEQ ID NO: 7108 - DNA, 21 bp, Homo sapiens
tgctctggttmgtattggtag

SEQ ID NO: 7109 - DNA, 21 bp, Homo sapiens
atggcatcatrctaacagaca

SEQ ID NO: 7110 - DNA, 21 bp, Homo sapiens
cagtgagaggratcaaatgag

SEQ ID NO: 7111 - DNA, 21 bp, Homo sapiens
tggattgcctrtgatacttct

SEQ ID NO: 7112 - DNA, 21 bp, Homo sapiens
aaactgaatgytcatacatgt

SEQ ID NO: 7113 - DNA, 21 bp, Homo sapiens
acagggcctcraattcttccc

SEQ ID NO: 7114 - DNA, 21 bp, Homo sapiens
gtataaagtaygtgcaaacac

SEQ ID NO: 7115 - DNA, 21 bp, Homo sapiens
tcttcttagcygggaaactag

SEQ ID NO: 7116 - DNA, 21 bp, Homo sapiens
aggagaagtcrtggcctaaag

SEQ ID NO: 7117 - DNA, 21 bp, Homo sapiens
tactggagcayggaccatttc

SEQ ID NO: 7118 - DNA, 21 bp, Homo sapiens
catatccaaartgcttcgctg

SEQ ID NO: 7119 - DNA, 21 bp, Homo sapiens
atagtagatgrtttagttact

SEQ ID NO: 7120 - DNA, 21 bp, Homo sapiens
atttatgccarataagtattt

SEQ ID NO: 7121 - DNA, 21 bp, Homo sapiens
ggataagaackctatatttca

SEQ ID NO: 7122 - DNA, 21 bp, Homo sapiens
gctagggatcytaaaatactt

SEQ ID NO: 7123 - DNA, 21 bp, Homo sapiens
gggaaaaatgycccttgttct

SEQ ID NO: 7124 - DNA, 21 bp, Homo sapiens
cagaaaacacrtgggaaaaag

SEQ ID NO: 7125 - DNA, 21 bp, Homo sapiens
atgataagtgmaaaacaggtt

SEQ ID NO: 7126 - DNA, 21 bp, Homo sapiens
gtagtatagcmttttctccac

SEQ ID NO: 7127 - DNA, 21 bp, Homo sapiens
gaacaagattwagcttttaac

SEQ ID NO: 7128 - DNA, 21 bp, Homo sapiens
tcagacaattwtttttggtac

SEQ ID NO: 7129 - DNA, 21 bp, Homo sapiens
tcgagtctgasttttttgaag

SEQ ID NO: 7130 - DNA, 21 bp, Homo sapiens
agatcaggagsctggagtcct

SEQ ID NO: 7131 - DNA, 21 bp, Homo sapiens
tgaaactaaaytgacagcgtc

SEQ ID NO: 7132 - DNA, 21 bp, Homo sapiens
tccataaaacytagctcatta

SEQ ID NO: 7133 - DNA, 21 bp, Homo sapiens
tttgagtcttrtgtttttcca

SEQ ID NO: 7134 - DNA, 21 bp, Homo sapiens
atcctccccayaggaaaccac

SEQ ID NO: 7135 - DNA, 21 bp, Homo sapiens
atatcactgcrtatgacaatg

SEQ ID NO: 7136 - DNA, 21 bp, Homo sapiens
gggagatgccrttatgtgttc

SEQ ID NO: 7137 - DNA, 21 bp, Homo sapiens
cattttcagarttaattgtgt

SEQ ID NO: 7138 - DNA, 21 bp, Homo sapiens
gatctttatgytcacctttac

SEQ ID NO: 7139 - DNA, 21 bp, Homo sapiens
atttggaaaarggtaaaatta

SEQ ID NO: 7140 - DNA, 21 bp, Homo sapiens
ccaagcttcayggggtagccg

SEQ ID NO: 7141 - DNA, 21 bp, Homo sapiens
ttggatcaaaycttttatagg

SEQ ID NO: 7142 - DNA, 21 bp, Homo sapiens
acatgacacarcttttttcca

SEQ ID NO: 7143 - DNA, 21 bp, Homo sapiens
ttttgctttgyggactaatct

SEQ ID NO: 7144 - DNA, 21 bp, Homo sapiens
ttgctcatctraattaatcct

SEQ ID NO: 7145 - DNA, 21 bp, Homo sapiens
tatccttaaargtaaagatga

SEQ ID NO: 7146 - DNA, 21 bp, Homo sapiens
tatctgagtcrtgcagcacct

SEQ ID NO: 7147 - DNA, 21 bp, Homo sapiens
ctctaaatggrtgacgaggtt

SEQ ID NO: 7148 - DNA, 21 bp, Homo sapiens
ttgaagtaaamttttgtattg

SEQ ID NO: 7149 - DNA, 21 bp, Homo sapiens
agtctggttcyggagttagca

SEQ ID NO: 7150 - DNA, 21 bp, Homo sapiens
aaatatgtacrtgcactcttt

SEQ ID NO: 7151 - DNA, 21 bp, Homo sapiens
caactcagatycaccattaat

SEQ ID NO: 7152 - DNA, 21 bp, Homo sapiens
acacaacttamtcaaattaat

SEQ ID NO: 7153 - DNA, 21 bp, Homo sapiens
tggtctggctyttttagaggt

SEQ ID NO: 7154 - DNA, 21 bp, Homo sapiens
ctcagtgcttygatataggag

SEQ ID NO: 7155 - DNA, 21 bp, Homo sapiens
ggtctttcaaytgaaactaga

SEQ ID NO: 7156 - DNA, 21 bp, Homo sapiens
cctatccccartttgatacta

SEQ ID NO: 7157 - DNA, 21 bp, Homo sapiens
cagcagtcagyattgaatggt

SEQ ID NO: 7158 - DNA, 21 bp, Homo sapiens
cactctgcatygtacagcata

SEQ ID NO: 7159 - DNA, 21 bp, Homo sapiens
gacgtgttgtyttagaattct

SEQ ID NO: 7160 - DNA, 21 bp, Homo sapiens
ttcaggtcagyatctaccatg

SEQ ID NO: 7161 - DNA, 21 bp, Homo sapiens
tccttctcttyaaatcttaca

SEQ ID NO: 7162 - DNA, 21 bp, Homo sapiens
gtcattatctstggtggaaaa

SEQ ID NO: 7163 - DNA, 21 bp, Homo sapiens
ggtgcttggtkccacaggttg

SEQ ID NO: 7164 - DNA, 21 bp, Homo sapiens
tcattctcttwtgcgttgcaa

SEQ ID NO: 7165 - DNA, 21 bp, Homo sapiens
gtgtgtatgtrtaaatgtacc

SEQ ID NO: 7166 - DNA, 21 bp, Homo sapiens
aatcttgttcrttgtaaaaga

SEQ ID NO: 7167 - DNA, 21 bp, Homo sapiens
gtattcagtaytttccatgag

SEQ ID NO: 7168 - DNA, 21 bp, Homo sapiens
acacgcctatyactccacttc

SEQ ID NO: 7169 - DNA, 21 bp, Homo sapiens
ttagggggtcraccatgctaa

SEQ ID NO: 7170 - DNA, 21 bp, Homo sapiens
tattatttctsctaactgggt

SEQ ID NO: 7171 - DNA, 21 bp, Homo sapiens
taacaaaatgrgctagaactt

SEQ ID NO: 7172 - DNA, 21 bp, Homo sapiens
gtatttgctaycactttacca

SEQ ID NO: 7173 - DNA, 21 bp, Homo sapiens
ccggaggaagytgacatttca

SEQ ID NO: 7174 - DNA, 21 bp, Homo sapiens
tgcgatcattrcattggtcac

SEQ ID NO: 7175 - DNA, 21 bp, Homo sapiens
tgggaaacacrccactgttga

SEQ ID NO: 7176 - DNA, 21 bp, Homo sapiens
agattgctcayatagagaaca

SEQ ID NO: 7177 - DNA, 21 bp, Homo sapiens
agtgacgatayttatttgtgt

SEQ ID NO: 7178 - DNA, 21 bp, Homo sapiens
ctcatgcctaygttcttgaac

SEQ ID NO: 7179 - DNA, 21 bp, Homo sapiens
ggacctcagayagtataagtt

SEQ ID NO: 7180 - DNA, 21 bp, Homo sapiens
actatcctttygttagaattt

SEQ ID NO: 7181 - DNA, 21 bp, Homo sapiens
caatctagaamttttggattt

SEQ ID NO: 7182 - DNA, 21 bp, Homo sapiens
tatgttgaacraagggctcag

SEQ ID NO: 7183 - DNA, 21 bp, Homo sapiens
tacttagctartttcctctct

SEQ ID NO: 7184 - DNA, 21 bp, Homo sapiens
gagacaaacaytgtggcagtg

SEQ ID NO: 7185 - DNA, 21 bp, Homo sapiens
aaatgagacarcaaatggaga

SEQ ID NO: 7186 - DNA, 21 bp, Homo sapiens
tagaaatctcrtacatattct

SEQ ID NO: 7187 - DNA, 21 bp, Homo sapiens
cattatttccwaagtgtgtct

SEQ ID NO: 7188 - DNA, 21 bp, Homo sapiens
agttctgtcartggaaaattt

SEQ ID NO: 7189 - DNA, 21 bp, Homo sapiens
atggggttacratggggttag

SEQ ID NO: 7190 - DNA, 21 bp, Homo sapiens
ttttaatatgrtctcagtggc

SEQ ID NO: 7191 - DNA, 21 bp, Homo sapiens
gtagaaaaaarttacagaaaa

SEQ ID NO: 7192 - DNA, 21 bp, Homo sapiens
tgtgggattakgttctcctga

SEQ ID NO: 7193 - DNA, 21 bp, Homo sapiens
ccattgcaatraatctttaga

SEQ ID NO: 7194 - DNA, 21 bp, Homo sapiens
aatttgaagtyagaattgttg

SEQ ID NO: 7195 - DNA, 21 bp, Homo sapiens
aggtttgagcstgaccatagg

SEQ ID NO: 7196 - DNA, 21 bp, Homo sapiens
tatattggtamttttatgaac

SEQ ID NO: 7197 - DNA, 21 bp, Homo sapiens
ctgcaaacatrtagactttat

SEQ ID NO: 7198 - DNA, 21 bp, Homo sapiens
caaactgacaragtaaagaat

SEQ ID NO: 7199 - DNA, 21 bp, Homo sapiens
cagcttcttcrtattaagttg

SEQ ID NO: 7200 - DNA, 21 bp, Homo sapiens
caaacgtagarttcagagaaa

SEQ ID NO: 7201 - DNA, 21 bp, Homo sapiens
aaacccaggcragcacattag

SEQ ID NO: 7202 - DNA, 21 bp, Homo sapiens
aattgaaggcrtcaaagagag

SEQ ID NO: 7203 - DNA, 21 bp, Homo sapiens
ggataaaaggrgtgtgctctg

SEQ ID NO: 7204 - DNA, 21 bp, Homo sapiens
gagacagaggwtacttactac

SEQ ID NO: 7205 - DNA, 21 bp, Homo sapiens
ctgggattaayttaataattt

SEQ ID NO: 7206 - DNA, 21 bp, Homo sapiens
gacctaaatakgtgatgtttt

SEQ ID NO: 7207 - DNA, 21 bp, Homo sapiens
cctttttaggmcattgtttat

SEQ ID NO: 7208 - DNA, 21 bp, Homo sapiens
catcaggatayactttttccc

SEQ ID NO: 7209 - DNA, 21 bp, Homo sapiens
tgtatagttgsacgagttgta

SEQ ID NO: 7210 - DNA, 21 bp, Homo sapiens
tgtccttgctytcactcagca

SEQ ID NO: 7211 - DNA, 21 bp, Homo sapiens
ttttcagttcragctttctga

SEQ ID NO: 7212 - DNA, 21 bp, Homo sapiens
ttacagttaayggaggaaact

SEQ ID NO: 7213 - DNA, 21 bp, Homo sapiens
agtaaataacyggagattagg

SEQ ID NO: 7214 - DNA, 21 bp, Homo sapiens
aaagctatgtrttcccaagta

SEQ ID NO: 7215 - DNA, 21 bp, Homo sapiens
aaataaatttrcggcattctg

SEQ ID NO: 7216 - DNA, 21 bp, Homo sapiens
taaaatgggawctagaaactg

SEQ ID NO: 7217 - DNA, 21 bp, Homo sapiens
atcgtcctctkcatgtcttca

SEQ ID NO: 7218 - DNA, 21 bp, Homo sapiens
tgtcatctacrcatctatttc

SEQ ID NO: 7219 - DNA, 21 bp, Homo sapiens
atttcgtgaaytgaagaatgc

SEQ ID NO: 7220 - DNA, 21 bp, Homo sapiens
ggcacccagtratgttcctcc

SEQ ID NO: 7221 - DNA, 21 bp, Homo sapiens
ttggatcattyttttcatgtt

SEQ ID NO: 7222 - DNA, 21 bp, Homo sapiens
aatcgggacarttgtgaaagt

SEQ ID NO: 7223 - DNA, 21 bp, Homo sapiens
atcctgagagrgagaaaaaag

SEQ ID NO: 7224 - DNA, 21 bp, Homo sapiens
gattttttttwttcgaccaaa

SEQ ID NO: 7225 - DNA, 21 bp, Homo sapiens
gaaaaacccarccatctcata

SEQ ID NO: 7226 - DNA, 21 bp, Homo sapiens
tggcactgaayaccgacgcca

SEQ ID NO: 7227 - DNA, 21 bp, Homo sapiens
aacttcatacrttctgatatc

SEQ ID NO: 7228 - DNA, 21 bp, Homo sapiens
tgaatacatcyctgatataag

SEQ ID NO: 7229 - DNA, 21 bp, Homo sapiens
agatctatccyaatacactgt

SEQ ID NO: 7230 - DNA, 21 bp, Homo sapiens
cataaataagkgaaaattttt

SEQ ID NO: 7231 - DNA, 21 bp, Homo sapiens
tcctcaattcrtgattaaaac

SEQ ID NO: 7232 - DNA, 21 bp, Homo sapiens
tgaattagagrtggtagctca

SEQ ID NO: 7233 - DNA, 21 bp, Homo sapiens
tgacaatttgyatgagaaaga

SEQ ID NO: 7234 - DNA, 21 bp, Homo sapiens
ttctccttggyccctggaaaa

SEQ ID NO: 7235 - DNA, 21 bp, Homo sapiens
aagagtagttytgttcactta

SEQ ID NO: 7236 - DNA, 21 bp, Homo sapiens
aaatgaggatwgtaatatgta

SEQ ID NO: 7237 - DNA, 21 bp, Homo sapiens
agtttgcaagrtaatatgttc

SEQ ID NO: 7238 - DNA, 21 bp, Homo sapiens
gtatagctgawacttatatag

SEQ ID NO: 7239 - DNA, 21 bp, Homo sapiens
atgctaagtcytccatgtttt

SEQ ID NO: 7240 - DNA, 21 bp, Homo sapiens
gtgcccatgaygatgatgaat

SEQ ID NO: 7241 - DNA, 21 bp, Homo sapiens
atttctattcwtctttcctgc

SEQ ID NO: 7242 - DNA, 21 bp, Homo sapiens
agcttggatascctgtgatag

SEQ ID NO: 7243 - DNA, 21 bp, Homo sapiens
ggaacgtagaytgtaataaca

SEQ ID NO: 7244 - DNA, 21 bp, Homo sapiens
tctgaattgcygtcactgtgg

SEQ ID NO: 7245 - DNA, 21 bp, Homo sapiens
catgtttgagygaatggcctg

SEQ ID NO: 7246 - DNA, 21 bp, Homo sapiens
ctttttattcygcatgagtct

SEQ ID NO: 7247 - DNA, 21 bp, Homo sapiens
cttaaaaatcmcggagctaga

SEQ ID NO: 7248 - DNA, 21 bp, Homo sapiens
atgatagtaamccaggtgcat

SEQ ID NO: 7249 - DNA, 21 bp, Homo sapiens
ttcaacatttytgtccctgaa

SEQ ID NO: 7250 - DNA, 21 bp, Homo sapiens
tctgtgtggcrattgttgaaa

SEQ ID NO: 7251 - DNA, 21 bp, Homo sapiens
gagatcccatyagctctcctc

SEQ ID NO: 7252 - DNA, 21 bp, Homo sapiens
tcacgtagccytcacaacaca

SEQ ID NO: 7253 - DNA, 21 bp, Homo sapiens
tttcactcatyatgtctagtg

SEQ ID NO: 7254 - DNA, 21 bp, Homo sapiens
ggtgccaggtyaaaaagtata

SEQ ID NO: 7255 - DNA, 21 bp, Homo sapiens
agctcccaaaygcaaatgtct

SEQ ID NO: 7256 - DNA, 21 bp, Homo sapiens
agggcccttayggaactcagt

SEQ ID NO: 7257 - DNA, 21 bp, Homo sapiens
ggtaggacgcrcgggagaact

SEQ ID NO: 7258 - DNA, 21 bp, Homo sapiens
gctgggccgtygggagtgttg

SEQ ID NO: 7259 - DNA, 21 bp, Homo sapiens
aggtctgagtyaaggtgctta

SEQ ID NO: 7260 - DNA, 21 bp, Homo sapiens
gagatggggasagagtttgca

SEQ ID NO: 7261 - DNA, 21 bp, Homo sapiens
tgagaacacgrgtgatgttga

SEQ ID NO: 7262 - DNA, 21 bp, Homo sapiens
ttgagaaaggrcaagctggag

SEQ ID NO: 7263 - DNA, 21 bp, Homo sapiens
catgaccaccrgaggctaagt

SEQ ID NO: 7264 - DNA, 21 bp, Homo sapiens
ctgatcttagracattgtctg

SEQ ID NO: 7265 - DNA, 21 bp, Homo sapiens
agctccaaacrgcaggggaat

SEQ ID NO: 7266 - DNA, 21 bp, Homo sapiens
acatttggaaraaagagatat

SEQ ID NO: 7267 - DNA, 21 bp, Homo sapiens
ttttatttttrggagtttgct

SEQ ID NO: 7268 - DNA, 21 bp, Homo sapiens
agatcctaagrcccagagcag

SEQ ID NO: 7269 - DNA, 21 bp, Homo sapiens
gctgggaagaygggcctaagg

SEQ ID NO: 7270 - DNA, 21 bp, Homo sapiens
ttctgcctctscttcgtgatc

SEQ ID NO: 7271 - DNA, 21 bp, Homo sapiens
tgtttcgtaaygttaatcaca

SEQ ID NO: 7272 - DNA, 21 bp, Homo sapiens
gcaagaggtcwcttcttctac

SEQ ID NO: 7273 - DNA, 21 bp, Homo sapiens
tttgacaacaygaaaataacg

SEQ ID NO: 7274 - DNA, 21 bp, Homo sapiens
tagttcctgtyactccagatg

SEQ ID NO: 7275 - DNA, 21 bp, Homo sapiens
cttttatggcrtaactgtctc

SEQ ID NO: 7276 - DNA, 21 bp, Homo sapiens
agccatgatgygcttatctgt

SEQ ID NO: 7277 - DNA, 21 bp, Homo sapiens
actaccaaccstgattatctc

SEQ ID NO: 7278 - DNA, 21 bp, Homo sapiens
tccacaccatrgcttggcagt

SEQ ID NO: 7279 - DNA, 21 bp, Homo sapiens
actagtccagktatattgtaa

SEQ ID NO: 7280 - DNA, 21 bp, Homo sapiens
gctaactgctwtatttaactt

SEQ ID NO: 7281 - DNA, 21 bp, Homo sapiens
catctctcagkggctctactg

SEQ ID NO: 7282 - DNA, 21 bp, Homo sapiens
taaacctgtaytccagatcct

SEQ ID NO: 7283 - DNA, 21 bp, Homo sapiens
ttcaacaaccrgtcccacata

SEQ ID NO: 7284 - DNA, 21 bp, Homo sapiens
acttcactgartacttgtgag

SEQ ID NO: 7285 - DNA, 21 bp, Homo sapiens
tctcaagattrtgtataaaag

SEQ ID NO: 7286 - DNA, 21 bp, Homo sapiens
atgagtggccrgtgttattaa

SEQ ID NO: 7287 - DNA, 21 bp, Homo sapiens
accagctcttraatgaataga

SEQ ID NO: 7288 - DNA, 21 bp, Homo sapiens
ctcaaattcaygtagttagtg

SEQ ID NO: 7289 - DNA, 21 bp, Homo sapiens
atcctccaaaytgtaattctt

SEQ ID NO: 7290 - DNA, 21 bp, Homo sapiens
tctaggagggygatgacattc

SEQ ID NO: 7291 - DNA, 21 bp, Homo sapiens
tggtacttackgctgccttta

SEQ ID NO: 7292 - DNA, 21 bp, Homo sapiens
ggaatacgaaraacttcaggc

SEQ ID NO: 7293 - DNA, 21 bp, Homo sapiens
ttgacagagasgattaacatt

SEQ ID NO: 7294 - DNA, 21 bp, Homo sapiens
taagtaaccgrtactggcagc

SEQ ID NO: 7295 - DNA, 21 bp, Homo sapiens
aggcttttgaytgcttggcta

SEQ ID NO: 7296 - DNA, 21 bp, Homo sapiens
tgcctgacatwccacagctag

SEQ ID NO: 7297 - DNA, 21 bp, Homo sapiens
ggggtcagagyggtggttgtt

SEQ ID NO: 7298 - DNA, 21 bp, Homo sapiens
aactgcctccrtaaacaactt

SEQ ID NO: 7299 - DNA, 21 bp, Homo sapiens
tgtaatacttrtaacaaaaga

SEQ ID NO: 7300 - DNA, 21 bp, Homo sapiens
agtgtgcttcytccaaggcaa

SEQ ID NO: 7301 - DNA, 21 bp, Homo sapiens
atatctgtgcrgttttgctta

SEQ ID NO: 7302 - DNA, 21 bp, Homo sapiens
tattgcttcarttctaattct

SEQ ID NO: 7303 - DNA, 21 bp, Homo sapiens
attgtgagttsgaatagaaac

SEQ ID NO: 7304 - DNA, 21 bp, Homo sapiens
taaggcctaaytaaaatgcca

SEQ ID NO: 7305 - DNA, 21 bp, Homo sapiens
cctttctccaytagataagca

SEQ ID NO: 7306 - DNA, 21 bp, Homo sapiens
ctcaattaccrtctcctttct

SEQ ID NO: 7307 - DNA, 21 bp, Homo sapiens
tagttatgcaygaacattata

SEQ ID NO: 7308 - DNA, 21 bp, Homo sapiens
catggagtttsattgtgaaga

SEQ ID NO: 7309 - DNA, 21 bp, Homo sapiens
cttccagcaaygtcatttggt

SEQ ID NO: 7310 - DNA, 21 bp, Homo sapiens
tctggcttgcrgagtttctgc

SEQ ID NO: 7311 - DNA, 21 bp, Homo sapiens
cagaaaatacytgctatataa

SEQ ID NO: 7312 - DNA, 21 bp, Homo sapiens
taagatgttcmataaaaggct

SEQ ID NO: 7313 - DNA, 21 bp, Homo sapiens
taaactccagyaaaatctccc

SEQ ID NO: 7314 - DNA, 21 bp, Homo sapiens
cgttcctacawaaagatcgtg

SEQ ID NO: 7315 - DNA, 21 bp, Homo sapiens
tcagatgaacrctgcaggcca

SEQ ID NO: 7316 - DNA, 21 bp, Homo sapiens
tgcagtatgayagatgaatta

SEQ ID NO: 7317 - DNA, 21 bp, Homo sapiens
ccaataaaccrataatctaaa

SEQ ID NO: 7318 - DNA, 21 bp, Homo sapiens
tgttggacaamctttggctaa

SEQ ID NO: 7319 - DNA, 21 bp, Homo sapiens
tttgcagatasagagtaagtc

SEQ ID NO: 7320 - DNA, 21 bp, Homo sapiens
gcaattaatawgctgtggact

SEQ ID NO: 7321 - DNA, 21 bp, Homo sapiens
cctcctctacyattattctca

SEQ ID NO: 7322 - DNA, 21 bp, Homo sapiens
aattactgtayagattttgga

SEQ ID NO: 7323 - DNA, 21 bp, Homo sapiens
agggtaggggyctgctacatg

SEQ ID NO: 7324 - DNA, 21 bp, Homo sapiens
aaatatgctcsatttggcatt

SEQ ID NO: 7325 - DNA, 21 bp, Homo sapiens
taaagtgctasggttctcata

SEQ ID NO: 7326 - DNA, 21 bp, Homo sapiens
taaaagaaaargacatgctct

SEQ ID NO: 7327 - DNA, 21 bp, Homo sapiens
attatgtataygtatgtgctt

SEQ ID NO: 7328 - DNA, 21 bp, Homo sapiens
gacaactgaaytcgaacccat

SEQ ID NO: 7329 - DNA, 21 bp, Homo sapiens
ttgacaccaaygattttggaa

SEQ ID NO: 7330 - DNA, 21 bp, Homo sapiens
taccaagttgwtgctgttctt

SEQ ID NO: 7331 - DNA, 21 bp, Homo sapiens
aaaaccccaartgaagacatt

SEQ ID NO: 7332 - DNA, 21 bp, Homo sapiens
cactgtctttyaccatatcaa

SEQ ID NO: 7333 - DNA, 21 bp, Homo sapiens
gtctggaaggmctgactttaa

SEQ ID NO: 7334 - DNA, 21 bp, Homo sapiens
gtaagaaaacrtgaagattaa

SEQ ID NO: 7335 - DNA, 21 bp, Homo sapiens
ttctcaaaaamaaaaataatc

SEQ ID NO: 7336 - DNA, 21 bp, Homo sapiens
aagattgttargcaaggaaca

SEQ ID NO: 7337 - DNA, 21 bp, Homo sapiens
atcctatctcrttttttcttt

SEQ ID NO: 7338 - DNA, 21 bp, Homo sapiens
attgattagtktttcctgtgt

SEQ ID NO: 7339 - DNA, 21 bp, Homo sapiens
gaaccattgcyctataaagaa

SEQ ID NO: 7340 - DNA, 21 bp, Homo sapiens
gtatttaggtrgagcactaaa

SEQ ID NO: 7341 - DNA, 21 bp, Homo sapiens
tagtactgtcwtaaaacgagt

SEQ ID NO: 7342 - DNA, 21 bp, Homo sapiens
acttcattacrtgtgaacact

SEQ ID NO: 7343 - DNA, 21 bp, Homo sapiens
tcgtttcagamtttggtcctt

SEQ ID NO: 7344 - DNA, 21 bp, Homo sapiens
aattatcagarggtcccagag

SEQ ID NO: 7345 - DNA, 21 bp, Homo sapiens
gttctctacaktaccatcact

SEQ ID NO: 7346 - DNA, 21 bp, Homo sapiens
tgcttaaaaaragggttagag

SEQ ID NO: 7347 - DNA, 21 bp, Homo sapiens
gttttgggatmtgtcccattc

SEQ ID NO: 7348 - DNA, 21 bp, Homo sapiens
ttagttcttcsctaacctgga

SEQ ID NO: 7349 - DNA, 21 bp, Homo sapiens
ctcaacttttmactccaccct

SEQ ID NO: 7350 - DNA, 21 bp, Homo sapiens
aaactccccarcatggaatct

SEQ ID NO: 7351 - DNA, 21 bp, Homo sapiens
gtatacatccsgctgcaaaga

SEQ ID NO: 7352 - DNA, 21 bp, Homo sapiens
agtcacatctrttatatagtc

SEQ ID NO: 7353 - DNA, 21 bp, Homo sapiens
atcctggttaygaatagtcag

SEQ ID NO: 7354 - DNA, 21 bp, Homo sapiens
aggccctgacrtaatttcaac

SEQ ID NO: 7355 - DNA, 21 bp, Homo sapiens
agataaacccytgggcagcaa

SEQ ID NO: 7356 - DNA, 21 bp, Homo sapiens
acttgaaaatytctatacgtc

SEQ ID NO: 7357 - DNA, 21 bp, Homo sapiens
aatacaatgcyaagttttaga

SEQ ID NO: 7358 - DNA, 21 bp, Homo sapiens
gtctcctaacyactcagtctc

SEQ ID NO: 7359 - DNA, 21 bp, Homo sapiens
atgaatcacartataccaata

SEQ ID NO: 7360 - DNA, 21 bp, Homo sapiens
aggtgggaggygtgaaatcag

SEQ ID NO: 7361 - DNA, 21 bp, Homo sapiens
accagtgggaygtagctaaaa

SEQ ID NO: 7362 - DNA, 21 bp, Homo sapiens
acaagataaayggatttggaa

SEQ ID NO: 7363 - DNA, 21 bp, Homo sapiens
aaaaagcataygtaatcctct

SEQ ID NO: 7364 - DNA, 21 bp, Homo sapiens
aatcagttttrtggagtgcat

SEQ ID NO: 7365 - DNA, 21 bp, Homo sapiens
tcttcataaaygtttctgact

SEQ ID NO: 7366 - DNA, 21 bp, Homo sapiens
aagcttgtctrcatgggggct

SEQ ID NO: 7367 - DNA, 21 bp, Homo sapiens
attgttttctwcaatcatagc

SEQ ID NO: 7368 - DNA, 21 bp, Homo sapiens
ttaacacctcragagatacag

SEQ ID NO: 7369 - DNA, 21 bp, Homo sapiens
atatatggaawgaaagccttt

SEQ ID NO: 7370 - DNA, 21 bp, Homo sapiens
tctgtgattamcatgacttaa

SEQ ID NO: 7371 - DNA, 21 bp, Homo sapiens
tagatgttaarttcatacttg

SEQ ID NO: 7372 - DNA, 21 bp, Homo sapiens
gatgataattrggtttaaaag

SEQ ID NO: 7373 - DNA, 21 bp, Homo sapiens
tgtgtatttcrttttagagct

SEQ ID NO: 7374 - DNA, 21 bp, Homo sapiens
tctcttttaayagcatcccaa

SEQ ID NO: 7375 - DNA, 21 bp, Homo sapiens
ggaagcaagtyaaagaatttg

SEQ ID NO: 7376 - DNA, 21 bp, Homo sapiens
attaatattgytgatattatt

SEQ ID NO: 7377 - DNA, 21 bp, Homo sapiens
caaaagaaaaraaaaagtctt

SEQ ID NO: 7378 - DNA, 21 bp, Homo sapiens
taatttcatayagtgcctttg

SEQ ID NO: 7379 - DNA, 21 bp, Homo sapiens
tgagacataaytggtgtcaat

SEQ ID NO: 7380 - DNA, 21 bp, Homo sapiens
ataggagccartagagaaaca

SEQ ID NO: 7381 - DNA, 21 bp, Homo sapiens
acttgctatcrcacaaaagag

SEQ ID NO: 7382 - DNA, 21 bp, Homo sapiens
agcatcaacasgggaaaaaaa

SEQ ID NO: 7383 - DNA, 21 bp, Homo sapiens
ggactggagcygacagacact

SEQ ID NO: 7384 - DNA, 21 bp, Homo sapiens
cccaggagatragtgccagag

SEQ ID NO: 7385 - DNA, 21 bp, Homo sapiens
attatgagacyatggaaaatt

SEQ ID NO: 7386 - DNA, 21 bp, Homo sapiens
tctagcatttrcactgaaagt

SEQ ID NO: 7387 - DNA, 21 bp, Homo sapiens
ttacaagtccrggtgtctagt

SEQ ID NO: 7388 - DNA, 21 bp, Homo sapiens
tggtagcatayagaatagtaa

SEQ ID NO: 7389 - DNA, 21 bp, Homo sapiens
ttcctctatcrttgtcatgct

SEQ ID NO: 7390 - DNA, 21 bp, Homo sapiens
cccatggaagrgcaaaaggca

SEQ ID NO: 7391 - DNA, 21 bp, Homo sapiens
ttagtaaataygctgacttcc

SEQ ID NO: 7392 - DNA, 21 bp, Homo sapiens
ctctctgaggrtgaaatgaga

SEQ ID NO: 7393 - DNA, 21 bp, Homo sapiens
gaatctctaayggactgagga

SEQ ID NO: 7394 - DNA, 21 bp, Homo sapiens
taccatgtgcrgttactaatg

SEQ ID NO: 7395 - DNA, 21 bp, Homo sapiens
tttctcccctyattggcctcg

SEQ ID NO: 7396 - DNA, 21 bp, Homo sapiens
cttaagaagarcctagagcaa

SEQ ID NO: 7397 - DNA, 21 bp, Homo sapiens
tcagagctccrtgcaggccca

SEQ ID NO: 7398 - DNA, 21 bp, Homo sapiens
ctagcgaggaygcgaaacttc

SEQ ID NO: 7399 - DNA, 21 bp, Homo sapiens
ttcagagcccragggagtgat

SEQ ID NO: 7400 - DNA, 21 bp, Homo sapiens
tgccttcttartctctgaggt

SEQ ID NO: 7401 - DNA, 21 bp, Homo sapiens
tggaaggtttygaggaggctc

SEQ ID NO: 7402 - DNA, 21 bp, Homo sapiens
agactgaggargaaggacagg

SEQ ID NO: 7403 - DNA, 21 bp, Homo sapiens
gtgcaaaaccrtcatacaaac

SEQ ID NO: 7404 - DNA, 21 bp, Homo sapiens
tgggggacttrgccctgacct

SEQ ID NO: 7405 - DNA, 21 bp, Homo sapiens
aagttttgagmagagactgtt

SEQ ID NO: 7406 - DNA, 21 bp, Homo sapiens
ctgcaggtaaytgagatgctg

SEQ ID NO: 7407 - DNA, 21 bp, Homo sapiens
agaaattctcrattaaagtcc

SEQ ID NO: 7408 - DNA, 21 bp, Homo sapiens
gaggctataaraagaaaatat

SEQ ID NO: 7409 - DNA, 21 bp, Homo sapiens
gtgggtgcgcrttcccttgcc

SEQ ID NO: 7410 - DNA, 21 bp, Homo sapiens
tcgtgaaggtkctagagcctc

SEQ ID NO: 7411 - DNA, 21 bp, Homo sapiens
tcccgggtgaktttgtgcaat

SEQ ID NO: 7412 - DNA, 21 bp, Homo sapiens
cggagcccccrtgtttctctg

SEQ ID NO: 7413 - DNA, 21 bp, Homo sapiens
atttgggtatrtgtgttgcta

SEQ ID NO: 7414 - DNA, 21 bp, Homo sapiens
atacagtttgmaggagctttg

SEQ ID NO: 7415 - DNA, 21 bp, Homo sapiens
tccagctgackgggcccttca

SEQ ID NO: 7416 - DNA, 21 bp, Homo sapiens
gtctccaagcygaccttgcct

SEQ ID NO: 7417 - DNA, 21 bp, Homo sapiens
actttccactytccttaggta

SEQ ID NO: 7418 - DNA, 21 bp, Homo sapiens
gatgtgtacaytatgatacaa

SEQ ID NO: 7419 - DNA, 21 bp, Homo sapiens
atagtctcttyctgggaccct

SEQ ID NO: 7420 - DNA, 21 bp, Homo sapiens
acaggcagatytgagtaactt

SEQ ID NO: 7421 - DNA, 21 bp, Homo sapiens
cccaggctctyttcctatttt

SEQ ID NO: 7422 - DNA, 21 bp, Homo sapiens
ctaagttcccygtcctgtact

SEQ ID NO: 7423 - DNA, 21 bp, Homo sapiens
ttagaacaaartaccctgcct

SEQ ID NO: 7424 - DNA, 21 bp, Homo sapiens
tttttcacccrttgtttactc

SEQ ID NO: 7425 - DNA, 21 bp, Homo sapiens
agataggtcgyggagggggac

SEQ ID NO: 7426 - DNA, 21 bp, Homo sapiens
tagtgcatttyatttcctaga

SEQ ID NO: 7427 - DNA, 21 bp, Homo sapiens
tctgcaattgyggagtgaaaa

SEQ ID NO: 7428 - DNA, 21 bp, Homo sapiens
ttgattttccwatggtgataa

SEQ ID NO: 7429 - DNA, 21 bp, Homo sapiens
taaagccctcmgtcccttctt

SEQ ID NO: 7430 - DNA, 21 bp, Homo sapiens
cctgatgtcaytgagcctcta

SEQ ID NO: 7431 - DNA, 21 bp, Homo sapiens
tttatcttgargtcctgaaat

SEQ ID NO: 7432 - DNA, 21 bp, Homo sapiens
tagcttcaggkaattcttttt

SEQ ID NO: 7433 - DNA, 21 bp, Homo sapiens
cataccgtttyagacggaggc

SEQ ID NO: 7434 - DNA, 21 bp, Homo sapiens
taaaacctaarttgcctcatc

SEQ ID NO: 7435 - DNA, 21 bp, Homo sapiens
tggaatggccrcatcaaccct

SEQ ID NO: 7436 - DNA, 21 bp, Homo sapiens
tacaaagcggmtcttggtctg

SEQ ID NO: 7437 - DNA, 21 bp, Homo sapiens
ccaattaaatraagcctatta

SEQ ID NO: 7438 - DNA, 21 bp, Homo sapiens
ctggacattakggttcatacg

SEQ ID NO: 7439 - DNA, 21 bp, Homo sapiens
tccttcctccyttgtcctggg

SEQ ID NO: 7440 - DNA, 21 bp, Homo sapiens
tacagcaattkgtaattcacg

SEQ ID NO: 7441 - DNA, 21 bp, Homo sapiens
agacctgtggrcacatctgaa

SEQ ID NO: 7442 - DNA, 21 bp, Homo sapiens
aggtatggccrggctgaggag

SEQ ID NO: 7443 - DNA, 21 bp, Homo sapiens
cttataggccrtttttataat

SEQ ID NO: 7444 - DNA, 21 bp, Homo sapiens
cacaaatatayacacatggaa

SEQ ID NO: 7445 - DNA, 21 bp, Homo sapiens
caaggaacgtrtgcagagaaa

SEQ ID NO: 7446 - DNA, 21 bp, Homo sapiens
gatcagggctkaccgtattta

SEQ ID NO: 7447 - DNA, 21 bp, Homo sapiens
catatttgtgktagtaagtca

SEQ ID NO: 7448 - DNA, 21 bp, Homo sapiens
gcaaacggcaycttttcaaaa

SEQ ID NO: 7449 - DNA, 21 bp, Homo sapiens
ccacttgggawtggcaactag

SEQ ID NO: 7450 - DNA, 21 bp, Homo sapiens
aactgaaataygttatctggg

SEQ ID NO: 7451 - DNA, 21 bp, Homo sapiens
aggtcattgakattgcataca

SEQ ID NO: 7452 - DNA, 21 bp, Homo sapiens
atccagagagygggcactcag

SEQ ID NO: 7453 - DNA, 21 bp, Homo sapiens
gattcccccartggtagagga

SEQ ID NO: 7454 - DNA, 21 bp, Homo sapiens
taagaggagascagaattcag

SEQ ID NO: 7455 - DNA, 21 bp, Homo sapiens
ataatcaccaygagtgcacac

SEQ ID NO: 7456 - DNA, 21 bp, Homo sapiens
atggaaatacmacttgcatct

SEQ ID NO: 7457 - DNA, 21 bp, Homo sapiens
acgatgccccwtcactccaag

SEQ ID NO: 7458 - DNA, 21 bp, Homo sapiens
acatgttgcaraaccaagaag

SEQ ID NO: 7459 - DNA, 21 bp, Homo sapiens
ctggggaggtrcatcctggtc

SEQ ID NO: 7460 - DNA, 21 bp, Homo sapiens
acatgatttcstcctggtaga

SEQ ID NO: 7461 - DNA, 21 bp, Homo sapiens
acagtggatgwcccctgatcc

SEQ ID NO: 7462 - DNA, 21 bp, Homo sapiens
ttacatcagtsgctcggtctc

SEQ ID NO: 7463 - DNA, 21 bp, Homo sapiens
ggtcttttacrcactaccttt

SEQ ID NO: 7464 - DNA, 21 bp, Homo sapiens
ggaaagacttyagtgtcagaa

SEQ ID NO: 7465 - DNA, 21 bp, Homo sapiens
agctgttaaartagaactccg

SEQ ID NO: 7466 - DNA, 21 bp, Homo sapiens
atgttcagcartgcagcccaa

SEQ ID NO: 7467 - DNA, 21 bp, Homo sapiens
acaaggcctgrtcatgtttcc

SEQ ID NO: 7468 - DNA, 21 bp, Homo sapiens
caggaatgaaragcatgcccg

SEQ ID NO: 7469 - DNA, 21 bp, Homo sapiens
cttcagataargttgcttttc

SEQ ID NO: 7470 - DNA, 21 bp, Homo sapiens
acctttgcttraaagcaccga

SEQ ID NO: 7471 - DNA, 21 bp, Homo sapiens
actctctcacrtttccaactt

SEQ ID NO: 7472 - DNA, 21 bp, Homo sapiens
aattaaaatgytcctggactt

SEQ ID NO: 7473 - DNA, 21 bp, Homo sapiens
attacccaacygtgtgtgttg

SEQ ID NO: 7474 - DNA, 21 bp, Homo sapiens
tccacctttgwgccaggaaac

SEQ ID NO: 7475 - DNA, 21 bp, Homo sapiens
gaaggcacacrttatttattt

SEQ ID NO: 7476 - DNA, 21 bp, Homo sapiens
ccggtttggtrgaaaggaaga

SEQ ID NO: 7477 - DNA, 21 bp, Homo sapiens
tttagagactyatttacaaga

SEQ ID NO: 7478 - DNA, 21 bp, Homo sapiens
ctataattctygttgaaaata

SEQ ID NO: 7479 - DNA, 21 bp, Homo sapiens
ctgaaactggrtctcctggtt

SEQ ID NO: 7480 - DNA, 21 bp, Homo sapiens
agtaaagaggktagttggttc

SEQ ID NO: 7481 - DNA, 21 bp, Homo sapiens
tgtctgacgaktccgacaaaa

SEQ ID NO: 7482 - DNA, 21 bp, Homo sapiens
taacacagccrtaaagctcta

SEQ ID NO: 7483 - DNA, 21 bp, Homo sapiens
aacccttttgyttagcagaaa

SEQ ID NO: 7484 - DNA, 21 bp, Homo sapiens
acttcattccygctcctcctg

SEQ ID NO: 7485 - DNA, 21 bp, Homo sapiens
tttaaactttytgtatagcaa

SEQ ID NO: 7486 - DNA, 21 bp, Homo sapiens
tgaagctgacrgatatccgct

SEQ ID NO: 7487 - DNA, 21 bp, Homo sapiens
gctgcaattayctaacaaaag

SEQ ID NO: 7488 - DNA, 21 bp, Homo sapiens
actcagttgargaccagagat

SEQ ID NO: 7489 - DNA, 21 bp, Homo sapiens
ccctgctttartctcagcaaa

SEQ ID NO: 7490 - DNA, 21 bp, Homo sapiens
ccatctaccayaaagcagctc

SEQ ID NO: 7491 - DNA, 21 bp, Homo sapiens
atcctttcackcagggctgag

SEQ ID NO: 7492 - DNA, 21 bp, Homo sapiens
aaaagtaaaasgagtctcctt

SEQ ID NO: 7493 - DNA, 21 bp, Homo sapiens
agaaagcaagrgccagtcagg

SEQ ID NO: 7494 - DNA, 21 bp, Homo sapiens
taggtgtcctygtaggtatta

SEQ ID NO: 7495 - DNA, 21 bp, Homo sapiens
agaaacacatrgttcaaccaa

SEQ ID NO: 7496 - DNA, 21 bp, Homo sapiens
gtgtatttggygtaagaagtt

SEQ ID NO: 7497 - DNA, 21 bp, Homo sapiens
ttcaggagcaytgcaacacaa

SEQ ID NO: 7498 - DNA, 21 bp, Homo sapiens
tcatgccagarctttagagcc

SEQ ID NO: 7499 - DNA, 21 bp, Homo sapiens
tgtaataatargtctaatcaa

SEQ ID NO: 7500 - DNA, 21 bp, Homo sapiens
cactgacttayatgcccttaa

SEQ ID NO: 7501 - DNA, 21 bp, Homo sapiens
ttttattaagwtatgccttgg

SEQ ID NO: 7502 - DNA, 21 bp, Homo sapiens
ttgtaaatccratgactattt

SEQ ID NO: 7503 - DNA, 21 bp, Homo sapiens
ctgatatgaarcaattcatca

SEQ ID NO: 7504 - DNA, 21 bp, Homo sapiens
gccctaccacrtgtgcaggtt

SEQ ID NO: 7505 - DNA, 21 bp, Homo sapiens
ctgttattgcytttcactgta

SEQ ID NO: 7506 - DNA, 21 bp, Homo sapiens
gattccatccygttgactttg

SEQ ID NO: 7507 - DNA, 21 bp, Homo sapiens
acctgagcccsagattttggt

SEQ ID NO: 7508 - DNA, 21 bp, Homo sapiens
tttggctgatrattttaggca

SEQ ID NO: 7509 - DNA, 21 bp, Homo sapiens
agcttcctcartaggaaaggt

SEQ ID NO: 7510 - DNA, 21 bp, Homo sapiens
taacaatagcyaatattcgta

SEQ ID NO: 7511 - DNA, 21 bp, Homo sapiens
ttcctagggayttgctaatgt

SEQ ID NO: 7512 - DNA, 21 bp, Homo sapiens
gcttatgtgtstgtgagtacc

SEQ ID NO: 7513 - DNA, 21 bp, Homo sapiens
aagggtgactrttgttctatc

SEQ ID NO: 7514 - DNA, 21 bp, Homo sapiens
aagatccactrcttgcacaag

SEQ ID NO: 7515 - DNA, 21 bp, Homo sapiens
gcagaaaaggstagaatacag

SEQ ID NO: 7516 - DNA, 21 bp, Homo sapiens
ttctgaggctyttagctcatt

SEQ ID NO: 7517 - DNA, 21 bp, Homo sapiens
ccaaatgattrccttgttgtt

SEQ ID NO: 7518 - DNA, 21 bp, Homo sapiens
ctggaagttgragcttagaac

SEQ ID NO: 7519 - DNA, 21 bp, Homo sapiens
atgtattgttyaaattgagcg

SEQ ID NO: 7520 - DNA, 21 bp, Homo sapiens
gaggaacactracaaaagcag

SEQ ID NO: 7521 - DNA, 21 bp, Homo sapiens
tcttcttttgsagtaactcaa

SEQ ID NO: 7522 - DNA, 21 bp, Homo sapiens
agaggaaaaaygaaataatag

SEQ ID NO: 7523 - DNA, 21 bp, Homo sapiens
ccttctatctytttgaacgct

SEQ ID NO: 7524 - DNA, 21 bp, Homo sapiens
gcagtcatacrtacacttgaa

SEQ ID NO: 7525 - DNA, 21 bp, Homo sapiens
cacctgacatyacattcattt

SEQ ID NO: 7526 - DNA, 21 bp, Homo sapiens
ggaaaaaaaaraaatggcaac

SEQ ID NO: 7527 - DNA, 21 bp, Homo sapiens
tcacaataaascaggtgtttt

SEQ ID NO: 7528 - DNA, 21 bp, Homo sapiens
catatctgagraataaactct

SEQ ID NO: 7529 - DNA, 21 bp, Homo sapiens
tttcttttaasactattaagt

SEQ ID NO: 7530 - DNA, 21 bp, Homo sapiens
taagatgctgrgaagactgca

SEQ ID NO: 7531 - DNA, 21 bp, Homo sapiens
gctaaaatttkgccaagttct

SEQ ID NO: 7532 - DNA, 21 bp, Homo sapiens
gatataagtawcctcaactta

SEQ ID NO: 7533 - DNA, 21 bp, Homo sapiens
ctaggcctatrtacttcatct

SEQ ID NO: 7534 - DNA, 21 bp, Homo sapiens
ttatttcttcyagttgtcccc

SEQ ID NO: 7535 - DNA, 21 bp, Homo sapiens
agaaggaatcytttttaatcc

SEQ ID NO: 7536 - DNA, 21 bp, Homo sapiens
ctttaagccamcaattatagt

SEQ ID NO: 7537 - DNA, 21 bp, Homo sapiens
tttcacattcwtggtattttc

SEQ ID NO: 7538 - DNA, 21 bp, Homo sapiens
ggtcagttaartttggagatc

SEQ ID NO: 7539 - DNA, 21 bp, Homo sapiens
catatctttayagcgttactg

SEQ ID NO: 7540 - DNA, 21 bp, Homo sapiens
tcagaagacaygggaaacgca

SEQ ID NO: 7541 - DNA, 21 bp, Homo sapiens
tgaaaatcaayctctgtgtgt

SEQ ID NO: 7542 - DNA, 21 bp, Homo sapiens
ctgccagaccratgaaaacat

SEQ ID NO: 7543 - DNA, 21 bp, Homo sapiens
ctaaactaacrgagtcaacta

SEQ ID NO: 7544 - DNA, 21 bp, Homo sapiens
aaccctaagcrttctttgtat

SEQ ID NO: 7545 - DNA, 21 bp, Homo sapiens
agattgatacyatgacttctg

SEQ ID NO: 7546 - DNA, 21 bp, Homo sapiens
ccctaggagamaccttaatct

SEQ ID NO: 7547 - DNA, 21 bp, Homo sapiens
aagaatgaatscttcacaggg

SEQ ID NO: 7548 - DNA, 21 bp, Homo sapiens
gtatgtgtagrctaccattca

SEQ ID NO: 7549 - DNA, 21 bp, Homo sapiens
acattcctgcygtctcacttc

SEQ ID NO: 7550 - DNA, 21 bp, Homo sapiens
attattgataytgtgctatcc

SEQ ID NO: 7551 - DNA, 21 bp, Homo sapiens
cataatgcatrggtttgccag

SEQ ID NO: 7552 - DNA, 21 bp, Homo sapiens
tgactaaagawccctccctac

SEQ ID NO: 7553 - DNA, 21 bp, Homo sapiens
tcattcacaamctagcaatca

SEQ ID NO: 7554 - DNA, 21 bp, Homo sapiens
agcagagctcyatcaccggca

SEQ ID NO: 7555 - DNA, 21 bp, Homo sapiens
tgcctatcatrtattatcaag

SEQ ID NO: 7556 - DNA, 21 bp, Homo sapiens
gcctccaaatygctcaaggga

SEQ ID NO: 7557 - DNA, 21 bp, Homo sapiens
ttccatcagcrccaaataatt

SEQ ID NO: 7558 - DNA, 21 bp, Homo sapiens
aatgttgaacycctaatggct

SEQ ID NO: 7559 - DNA, 21 bp, Homo sapiens
gggtattgttyggagcaaagt

SEQ ID NO: 7560 - DNA, 21 bp, Homo sapiens
gtttcctaacytgctgccacc

SEQ ID NO: 7561 - DNA, 21 bp, Homo sapiens
gtgctggctgstgtggggatt

SEQ ID NO: 7562 - DNA, 21 bp, Homo sapiens
ttaaaatctcygcctttcttt

SEQ ID NO: 7563 - DNA, 21 bp, Homo sapiens
tgtgattcaaraagacaaatt

SEQ ID NO: 7564 - DNA, 21 bp, Homo sapiens
accttagtccraacagatgaa

SEQ ID NO: 7565 - DNA, 21 bp, Homo sapiens
tttgtgctttycagacctaaa

SEQ ID NO: 7566 - DNA, 21 bp, Homo sapiens
ggtcttttgargccatgccta

SEQ ID NO: 7567 - DNA, 21 bp, Homo sapiens
taactttcttytccttgtgcc

SEQ ID NO: 7568 - DNA, 21 bp, Homo sapiens
gagaaattgtytggcataaac

SEQ ID NO: 7569 - DNA, 21 bp, Homo sapiens
acttcctttaytgatatgata

SEQ ID NO: 7570 - DNA, 21 bp, Homo sapiens
aaaaaagccartgcaactgat

SEQ ID NO: 7571 - DNA, 21 bp, Homo sapiens
ctgcctgtatygttattagta

SEQ ID NO: 7572 - DNA, 21 bp, Homo sapiens
agatttgcttmcttgatccta

SEQ ID NO: 7573 - DNA, 21 bp, Homo sapiens
acgttattgaraagtaaatct

SEQ ID NO: 7574 - DNA, 21 bp, Homo sapiens
cattccttcakcaagagggtt

SEQ ID NO: 7575 - DNA, 21 bp, Homo sapiens
ccttaatgtayacacttgcaa

SEQ ID NO: 7576 - DNA, 21 bp, Homo sapiens
ctttgttagcygttggcagag

SEQ ID NO: 7577 - DNA, 21 bp, Homo sapiens
tgcattttagyccagtttttc

SEQ ID NO: 7578 - DNA, 21 bp, Homo sapiens
caattatgagyaattcattct

SEQ ID NO: 7579 - DNA, 21 bp, Homo sapiens
gctgttccttyataccctatc

SEQ ID NO: 7580 - DNA, 21 bp, Homo sapiens
aaggaacttayctgtcttcaa

SEQ ID NO: 7581 - DNA, 21 bp, Homo sapiens
gtctgacatcytcattccatt

SEQ ID NO: 7582 - DNA, 21 bp, Homo sapiens
cgtgctgagtracaacgggcc

SEQ ID NO: 7583 - DNA, 21 bp, Homo sapiens
aatactgcaayagtcaggacc

SEQ ID NO: 7584 - DNA, 21 bp, Homo sapiens
actggttaaaraattgaacaa

SEQ ID NO: 7585 - DNA, 21 bp, Homo sapiens
tcacaaagcarataaagaaga

SEQ ID NO: 7586 - DNA, 21 bp, Homo sapiens
tgtaatttatytacattgcca

SEQ ID NO: 7587 - DNA, 21 bp, Homo sapiens
aaattatagcrtgtaggatga

SEQ ID NO: 7588 - DNA, 21 bp, Homo sapiens
ggttctgtatytgcccccaaa

SEQ ID NO: 7589 - DNA, 21 bp, Homo sapiens
aatctactttktcactaatag

SEQ ID NO: 7590 - DNA, 21 bp, Homo sapiens
tctgactgacrtaatggatca

SEQ ID NO: 7591 - DNA, 21 bp, Homo sapiens
gaaatttaccraaagtacaga

SEQ ID NO: 7592 - DNA, 21 bp, Homo sapiens
gatttttagasctctctttgt

SEQ ID NO: 7593 - DNA, 21 bp, Homo sapiens
gcactgataawatttcctgca

SEQ ID NO: 7594 - DNA, 21 bp, Homo sapiens
gattgtgacgwaaagtccttg

SEQ ID NO: 7595 - DNA, 21 bp, Homo sapiens
ccttgggaatkatttcgcttg

SEQ ID NO: 7596 - DNA, 21 bp, Homo sapiens
ctccttgagcrctccctgatt

SEQ ID NO: 7597 - DNA, 21 bp, Homo sapiens
gtttctcagartgtgtctcca

SEQ ID NO: 7598 - DNA, 21 bp, Homo sapiens
aaaaccctgcrgggaaaagaa

SEQ ID NO: 7599 - DNA, 21 bp, Homo sapiens
cctgtacttgygaaacacttg

SEQ ID NO: 7600 - DNA, 21 bp, Homo sapiens
aatatacaggsaattatagta

SEQ ID NO: 7601 - DNA, 21 bp, Homo sapiens
ttacaaaaatraaaaaaatgc

SEQ ID NO: 7602 - DNA, 21 bp, Homo sapiens
ggctgcccaayagaaacttgc

SEQ ID NO: 7603 - DNA, 21 bp, Homo sapiens
atctatccctstgcacttgca

SEQ ID NO: 7604 - DNA, 21 bp, Homo sapiens
tcaaccctctrgagaacaaca

SEQ ID NO: 7605 - DNA, 21 bp, Homo sapiens
agtgccgggargaacccttgg

SEQ ID NO: 7606 - DNA, 21 bp, Homo sapiens
tggggaaacasaattcctcaa

SEQ ID NO: 7607 - DNA, 21 bp, Homo sapiens
ctggatgatayaatttcctaa

SEQ ID NO: 7608 - DNA, 21 bp, Homo sapiens
cagtgactgtrggctaagaat

SEQ ID NO: 7609 - DNA, 21 bp, Homo sapiens
aaatttttggraaagggtagg

SEQ ID NO: 7610 - DNA, 21 bp, Homo sapiens
cctacctacaycctcctgtat

SEQ ID NO: 7611 - DNA, 21 bp, Homo sapiens
accaggtcggsagctggctta

SEQ ID NO: 7612 - DNA, 21 bp, Homo sapiens
gtcccagtggrtgagggtgtg

SEQ ID NO: 7613 - DNA, 21 bp, Homo sapiens
tgaaatgccgstgatagagag

SEQ ID NO: 7614 - DNA, 21 bp, Homo sapiens
gtgataaggtstggacgaaaa

SEQ ID NO: 7615 - DNA, 21 bp, Homo sapiens
gaacccagagytgatttaaaa

SEQ ID NO: 7616 - DNA, 21 bp, Homo sapiens
caacccctcgytcacggagcc

SEQ ID NO: 7617 - DNA, 21 bp, Homo sapiens
tccaagccgcrgctctcgcca

SEQ ID NO: 7618 - DNA, 21 bp, Homo sapiens
atatacttgtrctttgaaaat

SEQ ID NO: 7619 - DNA, 21 bp, Homo sapiens
gtgtaataaayaaaaggcaac

SEQ ID NO: 7620 - DNA, 21 bp, Homo sapiens
gcatccctgcraacagcttct

SEQ ID NO: 7621 - DNA, 21 bp, Homo sapiens
agggcaatatrtaggtttgtt

SEQ ID NO: 7622 - DNA, 21 bp, Homo sapiens
ctgcagctcayggaggcagca

SEQ ID NO: 7623 - DNA, 21 bp, Homo sapiens
cattccacagkagagaaactg

SEQ ID NO: 7624 - DNA, 21 bp, Homo sapiens
atccactagtygcttccccag

SEQ ID NO: 7625 - DNA, 21 bp, Homo sapiens
ttggtcacacyattgcagaag

SEQ ID NO: 7626 - DNA, 21 bp, Homo sapiens
gctgccaagaytttgtcctct

SEQ ID NO: 7627 - DNA, 21 bp, Homo sapiens
ttttagaggasgtttgggggc

SEQ ID NO: 7628 - DNA, 21 bp, Homo sapiens
ctacccctttytaccttttgg

SEQ ID NO: 7629 - DNA, 21 bp, Homo sapiens
gatttttccaragcaaggtgg

SEQ ID NO: 7630 - DNA, 21 bp, Homo sapiens
tatgaagccamatgatataag

SEQ ID NO: 7631 - DNA, 21 bp, Homo sapiens
cagccacaggrttaacgtggc

SEQ ID NO: 7632 - DNA, 21 bp, Homo sapiens
aaatgccttgmatgagtatgg

SEQ ID NO: 7633 - DNA, 21 bp, Homo sapiens
aggcccacagsgatttccttc

SEQ ID NO: 7634 - DNA, 21 bp, Homo sapiens
tatgtaaagarggaggacatt

SEQ ID NO: 7635 - DNA, 21 bp, Homo sapiens
gagagaagggktcaggggccc

SEQ ID NO: 7636 - DNA, 21 bp, Homo sapiens
actgagggttytcaaggccac

SEQ ID NO: 7637 - DNA, 21 bp, Homo sapiens
tgggagggaakaatgtccctg

SEQ ID NO: 7638 - DNA, 21 bp, Homo sapiens
agtaattgaargccttaggtt

SEQ ID NO: 7639 - DNA, 21 bp, Homo sapiens
aatttcctttrtaaagaagac

SEQ ID NO: 7640 - DNA, 21 bp, Homo sapiens
ataatgcttaytcttgatgtt

SEQ ID NO: 7641 - DNA, 21 bp, Homo sapiens
agtagggtaarcgaatgggta

SEQ ID NO: 7642 - DNA, 21 bp, Homo sapiens
taggattggarggaaatgtaa

SEQ ID NO: 7643 - DNA, 21 bp, Homo sapiens
atgttagtgartatctccagc

SEQ ID NO: 7644 - DNA, 21 bp, Homo sapiens
gctccttgatkaccatttttt

SEQ ID NO: 7645 - DNA, 21 bp, Homo sapiens
tgtaccaggcratgcttccat

SEQ ID NO: 7646 - DNA, 21 bp, Homo sapiens
ccatcaaagasaataatcact

SEQ ID NO: 7647 - DNA, 21 bp, Homo sapiens
agaagaaactrccttaagtat

SEQ ID NO: 7648 - DNA, 21 bp, Homo sapiens
ttaaatgtggratgcaagcat

SEQ ID NO: 7649 - DNA, 21 bp, Homo sapiens
aattgcagtaytacttttgtc

SEQ ID NO: 7650 - DNA, 21 bp, Homo sapiens
cttgttggtcycattgcactg

SEQ ID NO: 7651 - DNA, 21 bp, Homo sapiens
cattatctgayaaccagtaga

SEQ ID NO: 7652 - DNA, 21 bp, Homo sapiens
tgaacatagtrtctagatcta

SEQ ID NO: 7653 - DNA, 21 bp, Homo sapiens
cacattggtcycaaatttcaa

SEQ ID NO: 7654 - DNA, 21 bp, Homo sapiens
ggaatacagtrtgccctttca

SEQ ID NO: 7655 - DNA, 21 bp, Homo sapiens
acccaagagtkaggactagta

SEQ ID NO: 7656 - DNA, 21 bp, Homo sapiens
actgttgttcmtcatagtatc

SEQ ID NO: 7657 - DNA, 21 bp, Homo sapiens
aaagcaaattkgttttttcca

SEQ ID NO: 7658 - DNA, 21 bp, Homo sapiens
ataaggaccakaaaggaatga

SEQ ID NO: 7659 - DNA, 21 bp, Homo sapiens
tgaatacatcygaagtaaaga

SEQ ID NO: 7660 - DNA, 21 bp, Homo sapiens
attccagaacktttgtcctta

SEQ ID NO: 7661 - DNA, 21 bp, Homo sapiens
agagatttgayatacattcaa

SEQ ID NO: 7662 - DNA, 21 bp, Homo sapiens
gagtagctctwcatttgccaa

SEQ ID NO: 7663 - DNA, 21 bp, Homo sapiens
gataaaagttmctactgagga

SEQ ID NO: 7664 - DNA, 21 bp, Homo sapiens
atctgacttcyagcattcagt

SEQ ID NO: 7665 - DNA, 21 bp, Homo sapiens
gtattccacaraagaataaag

SEQ ID NO: 7666 - DNA, 21 bp, Homo sapiens
agatgtggatytttagttaat

SEQ ID NO: 7667 - DNA, 21 bp, Homo sapiens
tcaaatgatgmagaagcttaa

SEQ ID NO: 7668 - DNA, 21 bp, Homo sapiens
aggatttgtaktgccagtggt

SEQ ID NO: 7669 - DNA, 21 bp, Homo sapiens
aggataatgtkctagatagct

SEQ ID NO: 7670 - DNA, 21 bp, Homo sapiens
ttacatttaaygacaggtttt

SEQ ID NO: 7671 - DNA, 21 bp, Homo sapiens
caaatgtttcygcgtaggttg

SEQ ID NO: 7672 - DNA, 21 bp, Homo sapiens
ttggcactgtscatgtttttg

SEQ ID NO: 7673 - DNA, 21 bp, Homo sapiens
tgctatccagractgtccact

SEQ ID NO: 7674 - DNA, 21 bp, Homo sapiens
gcaccatggcrcttaactgta

SEQ ID NO: 7675 - DNA, 21 bp, Homo sapiens
attttctaccytttctagact

SEQ ID NO: 7676 - DNA, 21 bp, Homo sapiens
gtgaattgcasgtgtaggagg

SEQ ID NO: 7677 - DNA, 21 bp, Homo sapiens
gtgaatcgctkgaatccgaag

SEQ ID NO: 7678 - DNA, 21 bp, Homo sapiens
ttaggggaaargtatatatat

SEQ ID NO: 7679 - DNA, 21 bp, Homo sapiens
caaagctccawgggagaatac

SEQ ID NO: 7680 - DNA, 21 bp, Homo sapiens
ttatttttacrgaaaaacccc

SEQ ID NO: 7681 - DNA, 21 bp, Homo sapiens
tcacaaaatgygtagtatatt

SEQ ID NO: 7682 - DNA, 21 bp, Homo sapiens
aagccttacartatcccttct

SEQ ID NO: 7683 - DNA, 21 bp, Homo sapiens
tctatagaggrtagtaagtcc

SEQ ID NO: 7684 - DNA, 21 bp, Homo sapiens
tactgtttgamatagtttatc

SEQ ID NO: 7685 - DNA, 21 bp, Homo sapiens
taaataaagcstctagtacct

SEQ ID NO: 7686 - DNA, 21 bp, Homo sapiens
agagccctttmtgtcaaagtc

SEQ ID NO: 7687 - DNA, 21 bp, Homo sapiens
ggcaccattgrtctctgttac

SEQ ID NO: 7688 - DNA, 21 bp, Homo sapiens
gtcgtttaatrtttggggctc

SEQ ID NO: 7689 - DNA, 21 bp, Homo sapiens
atgtctgcccygggccacact

SEQ ID NO: 7690 - DNA, 21 bp, Homo sapiens
aattcctagcraaaaatctgt

SEQ ID NO: 7691 - DNA, 21 bp, Homo sapiens
tggtgtcatarttatgtaaat

SEQ ID NO: 7692 - DNA, 21 bp, Homo sapiens
gctagtgcatrttagttactt

SEQ ID NO: 7693 - DNA, 21 bp, Homo sapiens
gcccaaatttwtccagaactt

SEQ ID NO: 7694 - DNA, 21 bp, Homo sapiens
ccatataactrgattagtcat

SEQ ID NO: 7695 - DNA, 21 bp, Homo sapiens
tttctttgtckctagattgta

SEQ ID NO: 7696 - DNA, 21 bp, Homo sapiens
taatcccttcmtttggtcaac

SEQ ID NO: 7697 - DNA, 21 bp, Homo sapiens
ctcccaggccrctagcaaagc

SEQ ID NO: 7698 - DNA, 21 bp, Homo sapiens
gtaacaagagytcttttaagt

SEQ ID NO: 7699 - DNA, 21 bp, Homo sapiens
attgaaatgayttttggctac

SEQ ID NO: 7700 - DNA, 21 bp, Homo sapiens
ttgtctttacmatggtctgtg

SEQ ID NO: 7701 - DNA, 21 bp, Homo sapiens
ttaatttatayttgcagcaat

SEQ ID NO: 7702 - DNA, 21 bp, Homo sapiens
aagaagggaasactggccttt

SEQ ID NO: 7703 - DNA, 21 bp, Homo sapiens
ttgaggtacakttgaaagagt

SEQ ID NO: 7704 - DNA, 21 bp, Homo sapiens
atataatcttyctagatatgg

SEQ ID NO: 7705 - DNA, 21 bp, Homo sapiens
attttatataygaagaattcc

SEQ ID NO: 7706 - DNA, 21 bp, Homo sapiens
atcactctccygaattaagtt

SEQ ID NO: 7707 - DNA, 21 bp, Homo sapiens
tctgatcaacrtaaaattagg

SEQ ID NO: 7708 - DNA, 21 bp, Homo sapiens
cccatttaatktttaaactag

SEQ ID NO: 7709 - DNA, 21 bp, Homo sapiens
tgtcatctgtktctgatttgt

SEQ ID NO: 7710 - DNA, 21 bp, Homo sapiens
ctataaattargtagagaaca

SEQ ID NO: 7711 - DNA, 21 bp, Homo sapiens
ttaggggtttmaatttcttct

SEQ ID NO: 7712 - DNA, 21 bp, Homo sapiens
aaaaataacawgttgaagtaa

SEQ ID NO: 7713 - DNA, 21 bp, Homo sapiens
gccacctcacrcagaattgtg

SEQ ID NO: 7714 - DNA, 21 bp, Homo sapiens
cctgcttaccmaaaactgcac

SEQ ID NO: 7715 - DNA, 21 bp, Homo sapiens
acaatgtgccygttcagatat

SEQ ID NO: 7716 - DNA, 21 bp, Homo sapiens
tgctgtgaatrttctatgagc

SEQ ID NO: 7717 - DNA, 21 bp, Homo sapiens
ctgtgccaggmagtttggtaa

SEQ ID NO: 7718 - DNA, 21 bp, Homo sapiens
agtttccttayatatagcaaa

SEQ ID NO: 7719 - DNA, 21 bp, Homo sapiens
attaaatttgytattactgct

SEQ ID NO: 7720 - DNA, 21 bp, Homo sapiens
tttggaaaatktgcaggccta

SEQ ID NO: 7721 - DNA, 21 bp, Homo sapiens
aagttggtaamaaaaaaacaa

SEQ ID NO: 7722 - DNA, 21 bp, Homo sapiens
ttttgtctttktatggtttct

SEQ ID NO: 7723 - DNA, 21 bp, Homo sapiens
aaaagataccyaaaagtgcag

SEQ ID NO: 7724 - DNA, 21 bp, Homo sapiens
gccttcagagkcatgaatgag

SEQ ID NO: 7725 - DNA, 21 bp, Homo sapiens
ttattcagtcwttgacagtgt

SEQ ID NO: 7726 - DNA, 21 bp, Homo sapiens
gaacaagaacmcttcaataaa

SEQ ID NO: 7727 - DNA, 21 bp, Homo sapiens
ttaatttcttkaggagaagca

SEQ ID NO: 7728 - DNA, 21 bp, Homo sapiens
cagaattaatktccttgtgcc

SEQ ID NO: 7729 - DNA, 21 bp, Homo sapiens
cagaaaattaractcattgga

SEQ ID NO: 7730 - DNA, 21 bp, Homo sapiens
atttatgttcrgaaataacat

SEQ ID NO: 7731 - DNA, 21 bp, Homo sapiens
tgctgctgtayactttttcat

SEQ ID NO: 7732 - DNA, 21 bp, Homo sapiens
acttaaccttrgcatagtaat

SEQ ID NO: 7733 - DNA, 21 bp, Homo sapiens
gctgcctttargatcaaccta

SEQ ID NO: 7734 - DNA, 21 bp, Homo sapiens
agcttcgtatraaaaaaaaca

SEQ ID NO: 7735 - DNA, 21 bp, Homo sapiens
atcacatagayatgtatggtg

SEQ ID NO: 7736 - DNA, 21 bp, Homo sapiens
agcatcgacgyggtacccttg

SEQ ID NO: 7737 - DNA, 21 bp, Homo sapiens
aaaaattaacycagaaccttc

SEQ ID NO: 7738 - DNA, 21 bp, Homo sapiens
aacattcattyagcataaaca

SEQ ID NO: 7739 - DNA, 21 bp, Homo sapiens
ggcttactccrtttgcctgag

SEQ ID NO: 7740 - DNA, 21 bp, Homo sapiens
caacagtaatmaaggaaactt

SEQ ID NO: 7741 - DNA, 21 bp, Homo sapiens
atttctttacrtgctttttta

SEQ ID NO: 7742 - DNA, 21 bp, Homo sapiens
ctaagaatatyctgagtgata

SEQ ID NO: 7743 - DNA, 21 bp, Homo sapiens
agtaatactamcatgaaagag

SEQ ID NO: 7744 - DNA, 21 bp, Homo sapiens
tggcctactayataggaatta

SEQ ID NO: 7745 - DNA, 21 bp, Homo sapiens
tgaacctttaraaaaaagtta

SEQ ID NO: 7746 - DNA, 21 bp, Homo sapiens
cttcattgtgytgccaagatt

SEQ ID NO: 7747 - DNA, 21 bp, Homo sapiens
ttaatttctaytgactatttt

SEQ ID NO: 7748 - DNA, 21 bp, Homo sapiens
aactactgtgmtgtcaaacta

SEQ ID NO: 7749 - DNA, 21 bp, Homo sapiens
tgtgaaaaatyctatcttata

SEQ ID NO: 7750 - DNA, 21 bp, Homo sapiens
tctataaagcytgccaacatc

SEQ ID NO: 7751 - DNA, 21 bp, Homo sapiens
tgagcaattaycgtgttactc

SEQ ID NO: 7752 - DNA, 21 bp, Homo sapiens
agaaaagacarggatggctta

SEQ ID NO: 7753 - DNA, 21 bp, Homo sapiens
atttgattaamtttcctaaat

SEQ ID NO: 7754 - DNA, 21 bp, Homo sapiens
cgccaccaacratgactatat

SEQ ID NO: 7755 - DNA, 21 bp, Homo sapiens
acaaaagcttktggggaggta

SEQ ID NO: 7756 - DNA, 21 bp, Homo sapiens
caaatgatgcygtttggaaaa

SEQ ID NO: 7757 - DNA, 21 bp, Homo sapiens
catgcaggctrgaaaccctgg

SEQ ID NO: 7758 - DNA, 21 bp, Homo sapiens
ctgcaactgayatactgcagc

SEQ ID NO: 7759 - DNA, 21 bp, Homo sapiens
gaagaatagarttgaggggaa

SEQ ID NO: 7760 - DNA, 21 bp, Homo sapiens
tcttcttccartgcacacaaa

SEQ ID NO: 7761 - DNA, 21 bp, Homo sapiens
gactcagattkactttctctt

SEQ ID NO: 7762 - DNA, 21 bp, Homo sapiens
aggacacctgmagacagttct

SEQ ID NO: 7763 - DNA, 21 bp, Homo sapiens
cccacccattycaatttatcc

SEQ ID NO: 7764 - DNA, 21 bp, Homo sapiens
gaaaagccctrcaaagtgtac

SEQ ID NO: 7765 - DNA, 21 bp, Homo sapiens
ccagctacttytgcctccttc

SEQ ID NO: 7766 - DNA, 21 bp, Homo sapiens
gagcatgcaarcaataataaa

SEQ ID NO: 7767 - DNA, 21 bp, Homo sapiens
gtgtgtaaatrccatcttcag

SEQ ID NO: 7768 - DNA, 21 bp, Homo sapiens
accgtaagtckgtgattctta

SEQ ID NO: 7769 - DNA, 21 bp, Homo sapiens
acaaataaacygtgttagtaa

SEQ ID NO: 7770 - DNA, 21 bp, Homo sapiens
atgtagttttytaattggtct

SEQ ID NO: 7771 - DNA, 21 bp, Homo sapiens
aaaaaatttaytggcacttta

SEQ ID NO: 7772 - DNA, 21 bp, Homo sapiens
aattattaacrtgatgcttcg

SEQ ID NO: 7773 - DNA, 21 bp, Homo sapiens
taagtttacarctggaatttc

SEQ ID NO: 7774 - DNA, 21 bp, Homo sapiens
ttctcggttamcaattattaa

SEQ ID NO: 7775 - DNA, 21 bp, Homo sapiens
tcatccccaayaaaggcagag

SEQ ID NO: 7776 - DNA, 21 bp, Homo sapiens
ttgtctgcaarttcaatagct

SEQ ID NO: 7777 - DNA, 21 bp, Homo sapiens
catatcctttyctttttccag

SEQ ID NO: 7778 - DNA, 21 bp, Homo sapiens
ttttcacctayagcatgttta

SEQ ID NO: 7779 - DNA, 21 bp, Homo sapiens
caatcacttaycagaatcagg

SEQ ID NO: 7780 - DNA, 21 bp, Homo sapiens
tttggatataygtagttttct

SEQ ID NO: 7781 - DNA, 21 bp, Homo sapiens
atcaagagtaygattatgggt

SEQ ID NO: 7782 - DNA, 21 bp, Homo sapiens
aaaaattatcrtctgaaatca

SEQ ID NO: 7783 - DNA, 21 bp, Homo sapiens
cagtgagaatytggaacacag

SEQ ID NO: 7784 - DNA, 21 bp, Homo sapiens
ttgaacttctraacaagctgg

SEQ ID NO: 7785 - DNA, 21 bp, Homo sapiens
gggcctaatayttctcacaca

SEQ ID NO: 7786 - DNA, 21 bp, Homo sapiens
cacagtatttycttcctcttc

SEQ ID NO: 7787 - DNA, 21 bp, Homo sapiens
gatttaaacaytttttgaaga

SEQ ID NO: 7788 - DNA, 21 bp, Homo sapiens
atagccttagmtgtctcataa

SEQ ID NO: 7789 - DNA, 21 bp, Homo sapiens
cagaagatccrcagaatgctt

SEQ ID NO: 7790 - DNA, 21 bp, Homo sapiens
tgatatttctrtggaagtttt

SEQ ID NO: 7791 - DNA, 21 bp, Homo sapiens
aagggccattrtgacaaaaag

SEQ ID NO: 7792 - DNA, 21 bp, Homo sapiens
atctaatagcratatcagtaa

SEQ ID NO: 7793 - DNA, 21 bp, Homo sapiens
gaaaatcagamgtgtcactaa

SEQ ID NO: 7794 - DNA, 21 bp, Homo sapiens
tggatatgagktacacaaaat

SEQ ID NO: 7795 - DNA, 21 bp, Homo sapiens
ttactatgcaytcagtagttg

SEQ ID NO: 7796 - DNA, 21 bp, Homo sapiens
taaatttttayctaggatttt

SEQ ID NO: 7797 - DNA, 21 bp, Homo sapiens
ccagatctacraagctcaaat

SEQ ID NO: 7798 - DNA, 21 bp, Homo sapiens
taaaaactacmgaaaaatcag

SEQ ID NO: 7799 - DNA, 21 bp, Homo sapiens
tctattcattmaaggtcagtt

SEQ ID NO: 7800 - DNA, 21 bp, Homo sapiens
ctcacttaatmctaccaacaa

SEQ ID NO: 7801 - DNA, 21 bp, Homo sapiens
gaagacaactycaccagatat

SEQ ID NO: 7802 - DNA, 21 bp, Homo sapiens
aatgaaagatsaaagtaaata

SEQ ID NO: 7803 - DNA, 21 bp, Homo sapiens
gcacatagctrgaaatcagaa

SEQ ID NO: 7804 - DNA, 21 bp, Homo sapiens
aagtagatgtraggctgtcag

SEQ ID NO: 7805 - DNA, 21 bp, Homo sapiens
atttgccccaytttaaaagtt

SEQ ID NO: 7806 - DNA, 21 bp, Homo sapiens
gaggtggcccsaagtgcacaa

SEQ ID NO: 7807 - DNA, 21 bp, Homo sapiens
gatatcccaastaggtcaaca

SEQ ID NO: 7808 - DNA, 21 bp, Homo sapiens
aatcttagcarggcacataat

SEQ ID NO: 7809 - DNA, 21 bp, Homo sapiens
agagctttttsatttgccatc

SEQ ID NO: 7810 - DNA, 21 bp, Homo sapiens
attcaacattraaggagacat

SEQ ID NO: 7811 - DNA, 21 bp, Homo sapiens
actggaagtcmtattcatggt

SEQ ID NO: 7812 - DNA, 21 bp, Homo sapiens
aggaactaacrtgactgagtt

SEQ ID NO: 7813 - DNA, 21 bp, Homo sapiens
tgaaaagttgrtcaccctatg

SEQ ID NO: 7814 - DNA, 21 bp, Homo sapiens
agttctgcacraaggcctctt

SEQ ID NO: 7815 - DNA, 21 bp, Homo sapiens
aatttaagcakaaaaagggtc

SEQ ID NO: 7816 - DNA, 21 bp, Homo sapiens
tcctcaaagcycagatggttc

SEQ ID NO: 7817 - DNA, 21 bp, Homo sapiens
gctttttaatwatgtgttttt

SEQ ID NO: 7818 - DNA, 21 bp, Homo sapiens
atataaacccyattgatctta

SEQ ID NO: 7819 - DNA, 21 bp, Homo sapiens
gacaaaataarcccaagtgaa

SEQ ID NO: 7820 - DNA, 21 bp, Homo sapiens
tagcccagagstcccaaggct

SEQ ID NO: 7821 - DNA, 21 bp, Homo sapiens
tagcaatttgrtaatttctcc

SEQ ID NO: 7822 - DNA, 21 bp, Homo sapiens
gaagtggtcarttaaactacc

SEQ ID NO: 7823 - DNA, 21 bp, Homo sapiens
gtaaagatggyccctgtggaa

SEQ ID NO: 7824 - DNA, 21 bp, Homo sapiens
gttactttcaytagacactta

SEQ ID NO: 7825 - DNA, 21 bp, Homo sapiens
tgcctgtatgktagtgtccat

SEQ ID NO: 7826 - DNA, 21 bp, Homo sapiens
ctgttaggggkaagtttaatg

SEQ ID NO: 7827 - DNA, 21 bp, Homo sapiens
aatcaaaacayggcaaaggga

SEQ ID NO: 7828 - DNA, 21 bp, Homo sapiens
agtcacttcaycaagactgta

SEQ ID NO: 7829 - DNA, 21 bp, Homo sapiens
tggccaccaakcaagagtttg

SEQ ID NO: 7830 - DNA, 21 bp, Homo sapiens
atgttacttcragaagcactg

SEQ ID NO: 7831 - DNA, 21 bp, Homo sapiens
tactcacttgscatgttaaat

SEQ ID NO: 7832 - DNA, 21 bp, Homo sapiens
ctctgctaatyccaggcgaaa

SEQ ID NO: 7833 - DNA, 21 bp, Homo sapiens
ttacacttctrggttcccaag

SEQ ID NO: 7834 - DNA, 21 bp, Homo sapiens
tggttgtgtcyactacaggca

SEQ ID NO: 7835 - DNA, 21 bp, Homo sapiens
gaggatgatgyttattgttcc

SEQ ID NO: 7836 - DNA, 21 bp, Homo sapiens
atcttcaccamcctctttgat

SEQ ID NO: 7837 - DNA, 21 bp, Homo sapiens
ttgtcattcayctgccataca

SEQ ID NO: 7838 - DNA, 21 bp, Homo sapiens
cattaaaaaayatcaaaagac

SEQ ID NO: 7839 - DNA, 21 bp, Homo sapiens
tattccattgyatgggcacag

SEQ ID NO: 7840 - DNA, 21 bp, Homo sapiens
gcatgctataygatttaaatt

SEQ ID NO: 7841 - DNA, 21 bp, Homo sapiens
tgttgctctcrgagatttaag

SEQ ID NO: 7842 - DNA, 21 bp, Homo sapiens
gtgagccttayggtttggctg

SEQ ID NO: 7843 - DNA, 21 bp, Homo sapiens
gactaggccargaacagaggc

SEQ ID NO: 7844 - DNA, 21 bp, Homo sapiens
gagttggcacyaaaaatgatg

SEQ ID NO: 7845 - DNA, 21 bp, Homo sapiens
tgtttcaaccstgatggccac

SEQ ID NO: 7846 - DNA, 21 bp, Homo sapiens
tataaatttasttcagtgtca

SEQ ID NO: 7847 - DNA, 21 bp, Homo sapiens
ggctaaaggaytcaacgtgaa

SEQ ID NO: 7848 - DNA, 21 bp, Homo sapiens
atctgatgttyaaatatgaaa

SEQ ID NO: 7849 - DNA, 21 bp, Homo sapiens
ccattttcacrtgcctctact

SEQ ID NO: 7850 - DNA, 21 bp, Homo sapiens
catgctcttayttttgcaggt

SEQ ID NO: 7851 - DNA, 21 bp, Homo sapiens
tggagtcttcrgctatcagat

SEQ ID NO: 7852 - DNA, 21 bp, Homo sapiens
aaattactgcrcactgctgat

SEQ ID NO: 7853 - DNA, 21 bp, Homo sapiens
gtggggtaaaraatggaatca

SEQ ID NO: 7854 - DNA, 21 bp, Homo sapiens
ccggtgagcgyggtgctgaga

SEQ ID NO: 7855 - DNA, 21 bp, Homo sapiens
gggaaacgctsatgtgtatgg

SEQ ID NO: 7856 - DNA, 21 bp, Homo sapiens
tgagctgcaartgtggagacc

SEQ ID NO: 7857 - DNA, 21 bp, Homo sapiens
ctgggaaaagstgggagacca

SEQ ID NO: 7858 - DNA, 21 bp, Homo sapiens
gaaaatgatgrctgttttcat

SEQ ID NO: 7859 - DNA, 21 bp, Homo sapiens
agtagatgacratgatgacga

SEQ ID NO: 7860 - DNA, 21 bp, Homo sapiens
cagggtctgtsttgatggaga

SEQ ID NO: 7861 - DNA, 21 bp, Homo sapiens
ttccagacccrgggtcctacc

SEQ ID NO: 7862 - DNA, 21 bp, Homo sapiens
ggacatcaagytccaaaccct

SEQ ID NO: 7863 - DNA, 21 bp, Homo sapiens
gaatgtggatyatttgttccc

SEQ ID NO: 7864 - DNA, 21 bp, Homo sapiens
ctgggaataayctagttcctc

SEQ ID NO: 7865 - DNA, 21 bp, Homo sapiens
cagctctgggrtaaaagtcca

SEQ ID NO: 7866 - DNA, 21 bp, Homo sapiens
tctgaggtctkccaagctgag

SEQ ID NO: 7867 - DNA, 21 bp, Homo sapiens
aggagtaaccytcaggcaacc

SEQ ID NO: 7868 - DNA, 21 bp, Homo sapiens
gaggaacctakgaacgtccgt

SEQ ID NO: 7869 - DNA, 21 bp, Homo sapiens
tgtgaaggtcyttatggaggt

SEQ ID NO: 7870 - DNA, 21 bp, Homo sapiens
aaaacttcatyacattaaaca

SEQ ID NO: 7871 - DNA, 21 bp, Homo sapiens
caaggagtgtygagtcagtgg

SEQ ID NO: 7872 - DNA, 21 bp, Homo sapiens
cacattgcctytccacaaagc

SEQ ID NO: 7873 - DNA, 21 bp, Homo sapiens
caagtttatgraggaagaatg

SEQ ID NO: 7874 - DNA, 21 bp, Homo sapiens
gtttctcttaygatattgtcc

SEQ ID NO: 7875 - DNA, 21 bp, Homo sapiens
ctacgtaggakaaggtttgcc

SEQ ID NO: 7876 - DNA, 21 bp, Homo sapiens
aggtatccaargcccagtacc

SEQ ID NO: 7877 - DNA, 21 bp, Homo sapiens
tcaaacccccmggctaaggtc

SEQ ID NO: 7878 - DNA, 21 bp, Homo sapiens
atcacccccastagggcattc

SEQ ID NO: 7879 - DNA, 21 bp, Homo sapiens
gcctgggttasaggtgtcgtc

SEQ ID NO: 7880 - DNA, 21 bp, Homo sapiens
accactccccrtgttgccgca

SEQ ID NO: 7881 - DNA, 21 bp, Homo sapiens
tctccaatagyttcctttcct

SEQ ID NO: 7882 - DNA, 21 bp, Homo sapiens
cttactggccygagtacactg

SEQ ID NO: 7883 - DNA, 21 bp, Homo sapiens
cgtgtgattgycaaggtccaa

SEQ ID NO: 7884 - DNA, 21 bp, Homo sapiens
aatggactttyaactccttct

SEQ ID NO: 7885 - DNA, 21 bp, Homo sapiens
gtctcaccagstactctgttt

SEQ ID NO: 7886 - DNA, 21 bp, Homo sapiens
tgctccagtartggttgttta

SEQ ID NO: 7887 - DNA, 21 bp, Homo sapiens
tcctccattartgtaagtgca

SEQ ID NO: 7888 - DNA, 21 bp, Homo sapiens
ttgattgtggwtgaagcaaga

SEQ ID NO: 7889 - DNA, 21 bp, Homo sapiens
tatgggagccrtgtaaataat

SEQ ID NO: 7890 - DNA, 21 bp, Homo sapiens
cacacatagcrtctttttcac

SEQ ID NO: 7891 - DNA, 21 bp, Homo sapiens
tcaatttaaartgcatcaaaa

SEQ ID NO: 7892 - DNA, 21 bp, Homo sapiens
agagctgggakatacctctgc

SEQ ID NO: 7893 - DNA, 21 bp, Homo sapiens
acatcatcttsttgcagttgt

SEQ ID NO: 7894 - DNA, 21 bp, Homo sapiens
tgtacttcatmatttctgagg

SEQ ID NO: 7895 - DNA, 21 bp, Homo sapiens
ctcattcatcrtgtcttacag

SEQ ID NO: 7896 - DNA, 21 bp, Homo sapiens
ctggtcatcaragcagtttaa

SEQ ID NO: 7897 - DNA, 21 bp, Homo sapiens
tgcctggaccrtttcatgttt

SEQ ID NO: 7898 - DNA, 21 bp, Homo sapiens
tgggctgttcyctttgcctgg

SEQ ID NO: 7899 - DNA, 21 bp, Homo sapiens
gttgtagtgtraaaggatcat

SEQ ID NO: 7900 - DNA, 21 bp, Homo sapiens
aataaacacartgaagtacag

SEQ ID NO: 7901 - DNA, 21 bp, Homo sapiens
tccgttctttygattttaact

SEQ ID NO: 7902 - DNA, 21 bp, Homo sapiens
ataatctgtcycttgccatta

SEQ ID NO: 7903 - DNA, 21 bp, Homo sapiens
gccactggggwcatgatgtga

SEQ ID NO: 7904 - DNA, 21 bp, Homo sapiens
gagtttttttwaatatattga

SEQ ID NO: 7905 - DNA, 21 bp, Homo sapiens
ctgtccgtgascgttgctaga

SEQ ID NO: 7906 - DNA, 21 bp, Homo sapiens
ggcagaggccrtcagacaggt

SEQ ID NO: 7907 - DNA, 21 bp, Homo sapiens
ggcctagcacrctttgatgag

SEQ ID NO: 7908 - DNA, 21 bp, Homo sapiens
agaagcatcaygttgctaaca

SEQ ID NO: 7909 - DNA, 21 bp, Homo sapiens
atatatccagytgtaaatagc

SEQ ID NO: 7910 - DNA, 21 bp, Homo sapiens
cagagactttrgaggaaaaat

SEQ ID NO: 7911 - DNA, 21 bp, Homo sapiens
tggttttgccygtgtgaccaa

SEQ ID NO: 7912 - DNA, 21 bp, Homo sapiens
tcttgcgactrctccagacgt

SEQ ID NO: 7913 - DNA, 21 bp, Homo sapiens
ttctgcttccratgtgccatt

SEQ ID NO: 7914 - DNA, 21 bp, Homo sapiens
tctgaaaacamggcgatccca

SEQ ID NO: 7915 - DNA, 21 bp, Homo sapiens
ggtcagagacrgcctccccaa

SEQ ID NO: 7916 - DNA, 21 bp, Homo sapiens
tttgattcgaytgatggctac

SEQ ID NO: 7917 - DNA, 21 bp, Homo sapiens
tgtgtgtttcycagccccagg

SEQ ID NO: 7918 - DNA, 21 bp, Homo sapiens
ctgagcaaccyttcaaaggtg

SEQ ID NO: 7919 - DNA, 21 bp, Homo sapiens
aacaagctgcraaggggcctg

SEQ ID NO: 7920 - DNA, 21 bp, Homo sapiens
caccaagaaayctgtgtaatg

SEQ ID NO: 7921 - DNA, 21 bp, Homo sapiens
gtgagttgggycctgtttttt

SEQ ID NO: 7922 - DNA, 21 bp, Homo sapiens
atttttaaacsttttgtggct

SEQ ID NO: 7923 - DNA, 21 bp, Homo sapiens
atcttcagcaragtcctagat

SEQ ID NO: 7924 - DNA, 21 bp, Homo sapiens
ttgtgtgccaratgagttttt

SEQ ID NO: 7925 - DNA, 21 bp, Homo sapiens
gactgacttcmaaatgacaga

SEQ ID NO: 7926 - DNA, 21 bp, Homo sapiens
tattttatagyaggcgtgtat

SEQ ID NO: 7927 - DNA, 21 bp, Homo sapiens
cctcatgatgyataaaaacat

SEQ ID NO: 7928 - DNA, 21 bp, Homo sapiens
tctgccagaargaaaataagg

SEQ ID NO: 7929 - DNA, 21 bp, Homo sapiens
cacatgttcaygtggacttca

SEQ ID NO: 7930 - DNA, 21 bp, Homo sapiens
cccaaactgcyttagcaataa

SEQ ID NO: 7931 - DNA, 21 bp, Homo sapiens
ttaagttataytgctttaggt

SEQ ID NO: 7932 - DNA, 21 bp, Homo sapiens
tatataatagkttattcactc

SEQ ID NO: 7933 - DNA, 21 bp, Homo sapiens
acagtcttggrgtcttctgtc

SEQ ID NO: 7934 - DNA, 21 bp, Homo sapiens
aggtatgatcrctattctcaa

SEQ ID NO: 7935 - DNA, 21 bp, Homo sapiens
aaaaaagtcasccttagtcaa

SEQ ID NO: 7936 - DNA, 21 bp, Homo sapiens
gatgtctaccyaaccctccgt

SEQ ID NO: 7937 - DNA, 21 bp, Homo sapiens
ctaggtgaaastttttgaaat

SEQ ID NO: 7938 - DNA, 21 bp, Homo sapiens
ccaatggggcrccgaaagaga

SEQ ID NO: 7939 - DNA, 21 bp, Homo sapiens
atatgacttayctatggcttc

SEQ ID NO: 7940 - DNA, 21 bp, Homo sapiens
ttgaaattctyggcacctgtg

SEQ ID NO: 7941 - DNA, 21 bp, Homo sapiens
taggaagtttmaagcctgctt

SEQ ID NO: 7942 - DNA, 21 bp, Homo sapiens
cattaaagcayaaaggaaact

SEQ ID NO: 7943 - DNA, 21 bp, Homo sapiens
tttcaagattyctccagttcc

SEQ ID NO: 7944 - DNA, 21 bp, Homo sapiens
tcggtgtggtyacaagagcat

SEQ ID NO: 7945 - DNA, 21 bp, Homo sapiens
ccagcacaaayggtttctagt

SEQ ID NO: 7946 - DNA, 21 bp, Homo sapiens
aagctacaccrtatgcaaggc

SEQ ID NO: 7947 - DNA, 21 bp, Homo sapiens
atgttcagttytatatcccca

SEQ ID NO: 7948 - DNA, 21 bp, Homo sapiens
tggaagcaacraaaaaggaag

SEQ ID NO: 7949 - DNA, 21 bp, Homo sapiens
gagaaatctaycaaacaacat

SEQ ID NO: 7950 - DNA, 21 bp, Homo sapiens
cctgagcattkagttcatggg

SEQ ID NO: 7951 - DNA, 21 bp, Homo sapiens
aggcgagttgratcccttgaa

SEQ ID NO: 7952 - DNA, 21 bp, Homo sapiens
aagaccatctscttctagtgc

SEQ ID NO: 7953 - DNA, 21 bp, Homo sapiens
catattgtgtyctgttcatga

SEQ ID NO: 7954 - DNA, 21 bp, Homo sapiens
aagaccttcaraacaaaaccg

SEQ ID NO: 7955 - DNA, 21 bp, Homo sapiens
ttttagggttrgcacctgaca

SEQ ID NO: 7956 - DNA, 21 bp, Homo sapiens
gccatttgggrtataggaaac

SEQ ID NO: 7957 - DNA, 21 bp, Homo sapiens
caaaaaaatayagccaacata

SEQ ID NO: 7958 - DNA, 21 bp, Homo sapiens
ctgacttgccyggacacgtct

SEQ ID NO: 7959 - DNA, 21 bp, Homo sapiens
caatcctatckgtgaatttct

SEQ ID NO: 7960 - DNA, 21 bp, Homo sapiens
gctctgcgagygtttcctgtc

SEQ ID NO: 7961 - DNA, 21 bp, Homo sapiens
gtaagcccaaraagccccata

SEQ ID NO: 7962 - DNA, 21 bp, Homo sapiens
ccactgccctycatttgcacc

SEQ ID NO: 7963 - DNA, 21 bp, Homo sapiens
attggggccaycctgtgcatt

SEQ ID NO: 7964 - DNA, 21 bp, Homo sapiens
tcacttgccascttggccagg

SEQ ID NO: 7965 - DNA, 21 bp, Homo sapiens
cttgtcattcratcttgtcta

SEQ ID NO: 7966 - DNA, 21 bp, Homo sapiens
tcaggaacgaygatttataac

SEQ ID NO: 7967 - DNA, 21 bp, Homo sapiens
gggcctatgcrtagagtcagt

SEQ ID NO: 7968 - DNA, 21 bp, Homo sapiens
ctccttgctartaatcaatgt

SEQ ID NO: 7969 - DNA, 21 bp, Homo sapiens
cccttcgaatrcctcttgtag

SEQ ID NO: 7970 - DNA, 21 bp, Homo sapiens
cacggtgaacrttacatgcaa

SEQ ID NO: 7971 - DNA, 21 bp, Homo sapiens
ttaaacttgtstggctttgca

SEQ ID NO: 7972 - DNA, 21 bp, Homo sapiens
ttgagcccctyttctcttagt

SEQ ID NO: 7973 - DNA, 21 bp, Homo sapiens
ggaactctggscgttgatgta

SEQ ID NO: 7974 - DNA, 21 bp, Homo sapiens
atgtttcctgrataatgtgca

SEQ ID NO: 7975 - DNA, 21 bp, Homo sapiens
cctcattgatwagcatcggaa

SEQ ID NO: 7976 - DNA, 21 bp, Homo sapiens
gaatacatgtsagtgctagac

SEQ ID NO: 7977 - DNA, 21 bp, Homo sapiens
ccttccaccayatcagaaggt

SEQ ID NO: 7978 - DNA, 21 bp, Homo sapiens
tatgccgccamaatatatcaa

SEQ ID NO: 7979 - DNA, 21 bp, Homo sapiens
ctgcggatccrgcatcatgac

SEQ ID NO: 7980 - DNA, 21 bp, Homo sapiens
agttattggtrgtggaatatc

SEQ ID NO: 7981 - DNA, 21 bp, Homo sapiens
aggctgatcartctaggctgg

SEQ ID NO: 7982 - DNA, 21 bp, Homo sapiens
ttatttttccragcaagtttt

SEQ ID NO: 7983 - DNA, 21 bp, Homo sapiens
cacaccaatgrtatatatttt

SEQ ID NO: 7984 - DNA, 21 bp, Homo sapiens
tgacagacacmttaagagctt

SEQ ID NO: 7985 - DNA, 21 bp, Homo sapiens
tcattcatgcygagaccctga

SEQ ID NO: 7986 - DNA, 21 bp, Homo sapiens
aaaatgatgtmaggatccttt

SEQ ID NO: 7987 - DNA, 21 bp, Homo sapiens
atgaagccccrtaggatggct

SEQ ID NO: 7988 - DNA, 21 bp, Homo sapiens
atagatgctcytattggaaca

SEQ ID NO: 7989 - DNA, 21 bp, Homo sapiens
tagaacgtctraacagtgctg

SEQ ID NO: 7990 - DNA, 21 bp, Homo sapiens
cttgaggcttygtggcaaatg

SEQ ID NO: 7991 - DNA, 21 bp, Homo sapiens
agcatcgagtrtggaaacctc

SEQ ID NO: 7992 - DNA, 21 bp, Homo sapiens
atatgcttagraatatccagc

SEQ ID NO: 7993 - DNA, 21 bp, Homo sapiens
atatcctcaamccaaggagaa

SEQ ID NO: 7994 - DNA, 21 bp, Homo sapiens
ccattcagccstatcagtgaa

SEQ ID NO: 7995 - DNA, 21 bp, Homo sapiens
cagcggtcgtyggccagtgtg

SEQ ID NO: 7996 - DNA, 21 bp, Homo sapiens
caggaaatatyctcttttagg

SEQ ID NO: 7997 - DNA, 21 bp, Homo sapiens
atgagcataaratctaaatag

SEQ ID NO: 7998 - DNA, 21 bp, Homo sapiens
tctcagtaatmacattgtcca

SEQ ID NO: 7999 - DNA, 21 bp, Homo sapiens
ctagaatactsctcctccact

SEQ ID NO: 8000 - DNA, 21 bp, Homo sapiens
catgcggtatstgccattttg

SEQ ID NO: 8001 - DNA, 21 bp, Homo sapiens
tttcattagtractcacatgg

SEQ ID NO: 8002 - DNA, 21 bp, Homo sapiens
ttctcttgctkttctctaaag

SEQ ID NO: 8003 - DNA, 21 bp, Homo sapiens
cgttgagttastggttcactg

SEQ ID NO: 8004 - DNA, 21 bp, Homo sapiens
ttatagatgargttcccttag

SEQ ID NO: 8005 - DNA, 21 bp, Homo sapiens
ccctctcagtyagctgctaca

SEQ ID NO: 8006 - DNA, 21 bp, Homo sapiens
ttaggtgtatstctgctcatg

SEQ ID NO: 8007 - DNA, 21 bp, Homo sapiens
taataaataastgaaatacca

SEQ ID NO: 8008 - DNA, 21 bp, Homo sapiens
cgttgcaggcrcgttgaatgt

SEQ ID NO: 8009 - DNA, 21 bp, Homo sapiens
tatgtctttgrgcttggtaat

SEQ ID NO: 8010 - DNA, 21 bp, Homo sapiens
ggtgattccartgtgagtggt

SEQ ID NO: 8011 - DNA, 21 bp, Homo sapiens
tgttggtttcygtgttgatga

SEQ ID NO: 8012 - DNA, 21 bp, Homo sapiens
aagggtgtgaycagttccatg

SEQ ID NO: 8013 - DNA, 21 bp, Homo sapiens
gtaaaacagtrgatgtctttc

SEQ ID NO: 8014 - DNA, 21 bp, Homo sapiens
tgatagagaasctttccctag

SEQ ID NO: 8015 - DNA, 21 bp, Homo sapiens
acaatctgatygctcccctga

SEQ ID NO: 8016 - DNA, 21 bp, Homo sapiens
ttttaacaagrcaagtagaaa

SEQ ID NO: 8017 - DNA, 21 bp, Homo sapiens
agaactatgtktgttttcact

SEQ ID NO: 8018 - DNA, 21 bp, Homo sapiens
ttgctgggaaygtggccatca

SEQ ID NO: 8019 - DNA, 21 bp, Homo sapiens
actctcttgaygctatcctca

SEQ ID NO: 8020 - DNA, 21 bp, Homo sapiens
aaattctatgkgtaaaataat

SEQ ID NO: 8021 - DNA, 21 bp, Homo sapiens
ttgaaattgtmctggtttttc

SEQ ID NO: 8022 - DNA, 21 bp, Homo sapiens
gaaaagttgastagacaaaag

SEQ ID NO: 8023 - DNA, 21 bp, Homo sapiens
tcagattccamtcgaatacat

SEQ ID NO: 8024 - DNA, 21 bp, Homo sapiens
ttccttttatytcccatcagc

SEQ ID NO: 8025 - DNA, 21 bp, Homo sapiens
gattctgattkctccgtgata

SEQ ID NO: 8026 - DNA, 21 bp, Homo sapiens
aatgaacttgkgaaggtttgc

SEQ ID NO: 8027 - DNA, 21 bp, Homo sapiens
ccagtatagayaacttgtgat

SEQ ID NO: 8028 - DNA, 21 bp, Homo sapiens
atgttgagatyacatacatcc

SEQ ID NO: 8029 - DNA, 21 bp, Homo sapiens
aggactgggasagatctgtga

SEQ ID NO: 8030 - DNA, 21 bp, Homo sapiens
cttgccagcarccttttagat

SEQ ID NO: 8031 - DNA, 21 bp, Homo sapiens
tttttggggtwtcttccagcc

SEQ ID NO: 8032 - DNA, 21 bp, Homo sapiens
taaatcttctrtcaggtgatg

SEQ ID NO: 8033 - DNA, 21 bp, Homo sapiens
tttatttgggytttttcggtt

SEQ ID NO: 8034 - DNA, 21 bp, Homo sapiens
caacaattttkgaggcaccca

SEQ ID NO: 8035 - DNA, 21 bp, Homo sapiens
gtgatttgtcsaaggacatcg

SEQ ID NO: 8036 - DNA, 21 bp, Homo sapiens
tcctggtcccrtcttggctgg

SEQ ID NO: 8037 - DNA, 21 bp, Homo sapiens
gtgcagtgagratgaatcaac

SEQ ID NO: 8038 - DNA, 21 bp, Homo sapiens
tttttaccatrtctgttactc

SEQ ID NO: 8039 - DNA, 21 bp, Homo sapiens
gaggaaaattrggaatgaagt

SEQ ID NO: 8040 - DNA, 21 bp, Homo sapiens
aatcagaaatytgtgactcca

SEQ ID NO: 8041 - DNA, 21 bp, Homo sapiens
ctcctgaaacrtaatttggag

SEQ ID NO: 8042 - DNA, 21 bp, Homo sapiens
atgtggacacrtgcagccaca

SEQ ID NO: 8043 - DNA, 21 bp, Homo sapiens
ttcaagtcatrtttgccccca

SEQ ID NO: 8044 - DNA, 21 bp, Homo sapiens
gggtgtgtctrtatctataca

SEQ ID NO: 8045 - DNA, 21 bp, Homo sapiens
cttagcagagycaaaagccag

SEQ ID NO: 8046 - DNA, 21 bp, Homo sapiens
ccctggtcttmaagtccactc

SEQ ID NO: 8047 - DNA, 21 bp, Homo sapiens
ttgagttttcrtattgtcagt

SEQ ID NO: 8048 - DNA, 21 bp, Homo sapiens
attgtgatacwataggagccg

SEQ ID NO: 8049 - DNA, 21 bp, Homo sapiens
tcaagaaaccsacagaggtcc

SEQ ID NO: 8050 - DNA, 21 bp, Homo sapiens
cacttgtgctstgcaaaatca

SEQ ID NO: 8051 - DNA, 21 bp, Homo sapiens
aaccagcaggrttatatcccc

SEQ ID NO: 8052 - DNA, 21 bp, Homo sapiens
taccaaacacrtaagcttatt

SEQ ID NO: 8053 - DNA, 21 bp, Homo sapiens
attaagtggaratataggttt

SEQ ID NO: 8054 - DNA, 21 bp, Homo sapiens
agtgtaggacrctggaaaagt

SEQ ID NO: 8055 - DNA, 21 bp, Homo sapiens
gctcaaatgcrtgacatgatg

SEQ ID NO: 8056 - DNA, 21 bp, Homo sapiens
aagggattttsaagcagttgt

SEQ ID NO: 8057 - DNA, 21 bp, Homo sapiens
tagcatctctrgcataaacta

SEQ ID NO: 8058 - DNA, 21 bp, Homo sapiens
gttccatttamattgaatggc

SEQ ID NO: 8059 - DNA, 21 bp, Homo sapiens
gctcctgtgasggtttctaca

SEQ ID NO: 8060 - DNA, 21 bp, Homo sapiens
gttgtctccartgtgccttgt

SEQ ID NO: 8061 - DNA, 21 bp, Homo sapiens
ctttcctatayaacgcaagcc

SEQ ID NO: 8062 - DNA, 21 bp, Homo sapiens
ctgcagtggtrtcgctttaga

SEQ ID NO: 8063 - DNA, 21 bp, Homo sapiens
aagctgctatscttgcaaagg

SEQ ID NO: 8064 - DNA, 21 bp, Homo sapiens
aaaagcaggcraaatagaata

SEQ ID NO: 8065 - DNA, 21 bp, Homo sapiens
accatccaccrcaggcaaaca

SEQ ID NO: 8066 - DNA, 21 bp, Homo sapiens
cataaacgcayatggtcactt

SEQ ID NO: 8067 - DNA, 21 bp, Homo sapiens
cctgaattatyggagctcttg

SEQ ID NO: 8068 - DNA, 21 bp, Homo sapiens
taagtgatgcrtcagaatttc

SEQ ID NO: 8069 - DNA, 21 bp, Homo sapiens
ggaatgggagsagtttaaaca

SEQ ID NO: 8070 - DNA, 21 bp, Homo sapiens
gagctgagccrcacttggaga

SEQ ID NO: 8071 - DNA, 21 bp, Homo sapiens
agctatttccstaataccaag

SEQ ID NO: 8072 - DNA, 21 bp, Homo sapiens
tctgctctaaygttggatcat

SEQ ID NO: 8073 - DNA, 21 bp, Homo sapiens
ccagaaagtcscgagtgtttt

SEQ ID NO: 8074 - DNA, 21 bp, Homo sapiens
cttcgaattgktgcactagag

SEQ ID NO: 8075 - DNA, 21 bp, Homo sapiens
agtaggctctmacctggcagg

SEQ ID NO: 8076 - DNA, 21 bp, Homo sapiens
gtaaggtcccrtgacaattag

SEQ ID NO: 8077 - DNA, 21 bp, Homo sapiens
agttagacaaytagctcgccc

SEQ ID NO: 8078 - DNA, 21 bp, Homo sapiens
gttcaggcggyattaaccccc

SEQ ID NO: 8079 - DNA, 21 bp, Homo sapiens
atttgccaagktttgaaaagt

SEQ ID NO: 8080 - DNA, 21 bp, Homo sapiens
tccttttcccrtaattttatg

SEQ ID NO: 8081 - DNA, 21 bp, Homo sapiens
gtccttgatcrtttttcttgg

SEQ ID NO: 8082 - DNA, 21 bp, Homo sapiens
gtaaccaataycgctccttct

SEQ ID NO: 8083 - DNA, 21 bp, Homo sapiens
ttttgatgtayagacatccct

SEQ ID NO: 8084 - DNA, 21 bp, Homo sapiens
catacgggcartagtccgcat

SEQ ID NO: 8085 - DNA, 21 bp, Homo sapiens
tgtatgtttgsggtacaactc

SEQ ID NO: 8086 - DNA, 21 bp, Homo sapiens
gagaggtactsttagcaaatc

SEQ ID NO: 8087 - DNA, 21 bp, Homo sapiens
agaaatgagartgaggataaa

SEQ ID NO: 8088 - DNA, 21 bp, Homo sapiens
catagggtatytccagataat

SEQ ID NO: 8089 - DNA, 21 bp, Homo sapiens
ggagcaacctmactagagaca

SEQ ID NO: 8090 - DNA, 21 bp, Homo sapiens
cgcacctacaygcgtgggaac

SEQ ID NO: 8091 - DNA, 21 bp, Homo sapiens
gcaagacggaraaaatgcttc

SEQ ID NO: 8092 - DNA, 21 bp, Homo sapiens
tgccctgctgmatcttaggcg

SEQ ID NO: 8093 - DNA, 21 bp, Homo sapiens
ttcttaaactmtgatctatcc

SEQ ID NO: 8094 - DNA, 21 bp, Homo sapiens
tttttggcacktggctcttta

SEQ ID NO: 8095 - DNA, 21 bp, Homo sapiens
attttgcccaratgttatcag

SEQ ID NO: 8096 - DNA, 21 bp, Homo sapiens
tgcataaatgraagtcattat

SEQ ID NO: 8097 - DNA, 21 bp, Homo sapiens
tccatctctaytgctaaggaa

SEQ ID NO: 8098 - DNA, 21 bp, Homo sapiens
aatttgagacmacttttctgt

SEQ ID NO: 8099 - DNA, 21 bp, Homo sapiens
tagtagtgatkgatggcagaa

SEQ ID NO: 8100 - DNA, 21 bp, Homo sapiens
tttcccataartcatacgggc

SEQ ID NO: 8101 - DNA, 21 bp, Homo sapiens
agaactagccyttttgattcc

SEQ ID NO: 8102 - DNA, 21 bp, Homo sapiens
ccgcctccgcsacattttgca

SEQ ID NO: 8103 - DNA, 21 bp, Homo sapiens
tggacaccaamaaagtaggag

SEQ ID NO: 8104 - DNA, 21 bp, Homo sapiens
cctgccaaagrgttctagttt

SEQ ID NO: 8105 - DNA, 21 bp, Homo sapiens
catacagcatraagaacagac

SEQ ID NO: 8106 - DNA, 21 bp, Homo sapiens
cacagggctgsgctcagggca

SEQ ID NO: 8107 - DNA, 21 bp, Homo sapiens
tatgaacaacracaaaattta

SEQ ID NO: 8108 - DNA, 21 bp, Homo sapiens
gtcctttcaakgatgtctcta

SEQ ID NO: 8109 - DNA, 21 bp, Homo sapiens
ctatcttgcasgatcctagtg

SEQ ID NO: 8110 - DNA, 21 bp, Homo sapiens
accagtaggasccctggtgct

SEQ ID NO: 8111 - DNA, 21 bp, Homo sapiens
tgacagtctastttgcagttg

SEQ ID NO: 8112 - DNA, 21 bp, Homo sapiens
agaggcgggcsccataagaga

SEQ ID NO: 8113 - DNA, 21 bp, Homo sapiens
ttcatgtgttktcttagcatt

SEQ ID NO: 8114 - DNA, 21 bp, Homo sapiens
cggaagggaaratgatagaca

SEQ ID NO: 8115 - DNA, 21 bp, Homo sapiens
gaatgctaacytgtgttttcc

SEQ ID NO: 8116 - DNA, 21 bp, Homo sapiens
gagacatcctmagattaacaa

SEQ ID NO: 8117 - DNA, 21 bp, Homo sapiens
tttattattayaattgctcct

SEQ ID NO: 8118 - DNA, 21 bp, Homo sapiens
ctattaccaamagaagactac

SEQ ID NO: 8119 - DNA, 21 bp, Homo sapiens
ggatgaattcrgttctctgtg

SEQ ID NO: 8120 - DNA, 21 bp, Homo sapiens
tatctgatgckaatggtatat

SEQ ID NO: 8121 - DNA, 21 bp, Homo sapiens
gatatgtcacwgagtaggata

SEQ ID NO: 8122 - DNA, 21 bp, Homo sapiens
gcagagttatrggagacttct

SEQ ID NO: 8123 - DNA, 21 bp, Homo sapiens
atattttttaygggaaaaagc

SEQ ID NO: 8124 - DNA, 21 bp, Homo sapiens
ccttctccaayggcttaataa

SEQ ID NO: 8125 - DNA, 21 bp, Homo sapiens
cacttctctcktgttggagct

SEQ ID NO: 8126 - DNA, 21 bp, Homo sapiens
tgtttatgctratgaagtgac

SEQ ID NO: 8127 - DNA, 21 bp, Homo sapiens
tgggtagaatygagagaaaga

SEQ ID NO: 8128 - DNA, 21 bp, Homo sapiens
aggttttcacrtgatgctgtg

SEQ ID NO: 8129 - DNA, 21 bp, Homo sapiens
acaaggaagcrggcactgggc

SEQ ID NO: 8130 - DNA, 21 bp, Homo sapiens
tgtgagcagcsctcagtaaag

SEQ ID NO: 8131 - DNA, 21 bp, Homo sapiens
ctcccttgctrtaataagtgc

SEQ ID NO: 8132 - DNA, 21 bp, Homo sapiens
cctaacacgtmatttggtgtt

SEQ ID NO: 8133 - DNA, 21 bp, Homo sapiens
tcttgaaaagyggtgaaaatg

SEQ ID NO: 8134 - DNA, 21 bp, Homo sapiens
agccccaaacrttaacttctt

SEQ ID NO: 8135 - DNA, 21 bp, Homo sapiens
gcctgaagaakcctgagaatg

SEQ ID NO: 8136 - DNA, 21 bp, Homo sapiens
gctgcctaacmaacattccct

SEQ ID NO: 8137 - DNA, 21 bp, Homo sapiens
ttattttaccrtcctgaaagt

SEQ ID NO: 8138 - DNA, 21 bp, Homo sapiens
tgagagtgggyggacatgtag

SEQ ID NO: 8139 - DNA, 21 bp, Homo sapiens
gtgcagaccgwtaaagacaca

SEQ ID NO: 8140 - DNA, 21 bp, Homo sapiens
tttggggagawcacattccag

SEQ ID NO: 8141 - DNA, 21 bp, Homo sapiens
cttaatgttgmcttaaaccca

SEQ ID NO: 8142 - DNA, 21 bp, Homo sapiens
tgagcctttawcttctctatg

SEQ ID NO: 8143 - DNA, 21 bp, Homo sapiens
ctgtgccccaygccccacaga

SEQ ID NO: 8144 - DNA, 21 bp, Homo sapiens
tatgttgacaycatactagga

SEQ ID NO: 8145 - DNA, 21 bp, Homo sapiens
tgatgaggaakgacactgttt

SEQ ID NO: 8146 - DNA, 21 bp, Homo sapiens
ccaggtttgcrtgcctaccta

SEQ ID NO: 8147 - DNA, 21 bp, Homo sapiens
ttaattctgayacaggtcgtc

SEQ ID NO: 8148 - DNA, 21 bp, Homo sapiens
aagaaggttgsttttgttgct

SEQ ID NO: 8149 - DNA, 21 bp, Homo sapiens
aaagacatgtractacagatt

SEQ ID NO: 8150 - DNA, 21 bp, Homo sapiens
ctggattaagyatctactggt

SEQ ID NO: 8151 - DNA, 21 bp, Homo sapiens
gcagagaaggwtatgatttga

SEQ ID NO: 8152 - DNA, 21 bp, Homo sapiens
aaacagttctrtagaaggaca

SEQ ID NO: 8153 - DNA, 21 bp, Homo sapiens
aactgctgtgycctgggccta

SEQ ID NO: 8154 - DNA, 21 bp, Homo sapiens
atgtttgaaawctctggttgg

SEQ ID NO: 8155 - DNA, 21 bp, Homo sapiens
attctcaacckcccacctgtt

SEQ ID NO: 8156 - DNA, 21 bp, Homo sapiens
gttatcattayatttcttggt

SEQ ID NO: 8157 - DNA, 21 bp, Homo sapiens
ggttgggtgcytaaaattgcc

SEQ ID NO: 8158 - DNA, 21 bp, Homo sapiens
taatttgtacygatgcttaaa

SEQ ID NO: 8159 - DNA, 21 bp, Homo sapiens
gtattcatttrcaggctcttt

SEQ ID NO: 8160 - DNA, 21 bp, Homo sapiens
ggtacttagaygttaagtggg

SEQ ID NO: 8161 - DNA, 21 bp, Homo sapiens
agagcagatayaatcactgta

SEQ ID NO: 8162 - DNA, 21 bp, Homo sapiens
gtttccttagmttaagcctca

SEQ ID NO: 8163 - DNA, 21 bp, Homo sapiens
cttttctgggyaatctcattc

SEQ ID NO: 8164 - DNA, 21 bp, Homo sapiens
atcacgtctargaaaatttaa

SEQ ID NO: 8165 - DNA, 21 bp, Homo sapiens
tatcacaggartagtgggttg

SEQ ID NO: 8166 - DNA, 21 bp, Homo sapiens
aaataggaatrctagtcttaa

SEQ ID NO: 8167 - DNA, 21 bp, Homo sapiens
aaaccctgggmaagtgataat

SEQ ID NO: 8168 - DNA, 21 bp, Homo sapiens
cataaatacaktgttgagaaa

SEQ ID NO: 8169 - DNA, 21 bp, Homo sapiens
actagcaaaaycacctttcta

SEQ ID NO: 8170 - DNA, 21 bp, Homo sapiens
tatctgcaaargggttatttt

SEQ ID NO: 8171 - DNA, 21 bp, Homo sapiens
ggggctcctgstgaattataa

SEQ ID NO: 8172 - DNA, 21 bp, Homo sapiens
ttacttctccytacattatgt

SEQ ID NO: 8173 - DNA, 21 bp, Homo sapiens
cctgagaagayagccgtcaat

SEQ ID NO: 8174 - DNA, 21 bp, Homo sapiens
gaacaaggcartaccttgggg

SEQ ID NO: 8175 - DNA, 21 bp, Homo sapiens
gtaacaactaygaaaaaaaaa

SEQ ID NO: 8176 - DNA, 21 bp, Homo sapiens
attctgttctrttgattcaat

SEQ ID NO: 8177 - DNA, 21 bp, Homo sapiens
tgaaattaatrtgatttgttt

SEQ ID NO: 8178 - DNA, 21 bp, Homo sapiens
caatcaaaaartggcttatga

SEQ ID NO: 8179 - DNA, 21 bp, Homo sapiens
cttatttggtkttcccatttt

SEQ ID NO: 8180 - DNA, 21 bp, Homo sapiens
ttcaagtacayatcaattatt

SEQ ID NO: 8181 - DNA, 21 bp, Homo sapiens
attaaatacarcaaaatggca

SEQ ID NO: 8182 - DNA, 21 bp, Homo sapiens
tcactggtaarccatggctgc

SEQ ID NO: 8183 - DNA, 21 bp, Homo sapiens
acagagactgrtaagtatttc

SEQ ID NO: 8184 - DNA, 21 bp, Homo sapiens
aaagatcttasgcaaacagga

SEQ ID NO: 8185 - DNA, 21 bp, Homo sapiens
gcagaaaagasactgtctagg

SEQ ID NO: 8186 - DNA, 21 bp, Homo sapiens
acgtactttgrttgtttaaaa

SEQ ID NO: 8187 - DNA, 21 bp, Homo sapiens
caagtgttatytcccaggggt

SEQ ID NO: 8188 - DNA, 21 bp, Homo sapiens
agctcttacargaattgagaa

SEQ ID NO: 8189 - DNA, 21 bp, Homo sapiens
agaaattatcraagttcaagt

SEQ ID NO: 8190 - DNA, 21 bp, Homo sapiens
aacattagcayatttttaaca

SEQ ID NO: 8191 - DNA, 21 bp, Homo sapiens
gtttccactgygttgttttat

SEQ ID NO: 8192 - DNA, 21 bp, Homo sapiens
aatcttccaamtcttacagta

SEQ ID NO: 8193 - DNA, 21 bp, Homo sapiens
atcctttgatmctgatgctag

SEQ ID NO: 8194 - DNA, 21 bp, Homo sapiens
actacaatttwcttggattat

SEQ ID NO: 8195 - DNA, 21 bp, Homo sapiens
ataaagaaatraaactggaca

SEQ ID NO: 8196 - DNA, 21 bp, Homo sapiens
aaagagggtcratggctttta

SEQ ID NO: 8197 - DNA, 21 bp, Homo sapiens
gacaatcctgwtggtgccact

SEQ ID NO: 8198 - DNA, 21 bp, Homo sapiens
catgaaaaagwgcaaaaaatt

SEQ ID NO: 8199 - DNA, 21 bp, Homo sapiens
ccttacctgaragcctgaatg

SEQ ID NO: 8200 - DNA, 21 bp, Homo sapiens
ttagagaaaasttaagatgag

SEQ ID NO: 8201 - DNA, 21 bp, Homo sapiens
ttattcctgckgccagagctg

SEQ ID NO: 8202 - DNA, 21 bp, Homo sapiens
taattccaggyggcatactaa

SEQ ID NO: 8203 - DNA, 21 bp, Homo sapiens
ctggagagccrcttgagagta

SEQ ID NO: 8204 - DNA, 21 bp, Homo sapiens
cattctagccyaccccatgaa

SEQ ID NO: 8205 - DNA, 21 bp, Homo sapiens
tcttttagatktgtgggtata

SEQ ID NO: 8206 - DNA, 21 bp, Homo sapiens
atttaatatgrcttttttgct

SEQ ID NO: 8207 - DNA, 21 bp, Homo sapiens
ggtgaaaataygcaacattct

SEQ ID NO: 8208 - DNA, 21 bp, Homo sapiens
actaacattaytgctacttaa

SEQ ID NO: 8209 - DNA, 21 bp, Homo sapiens
cttcttttcaycttacttact

SEQ ID NO: 8210 - DNA, 21 bp, Homo sapiens
catgaattgayacacatattt

SEQ ID NO: 8211 - DNA, 21 bp, Homo sapiens
ctaaaaactgyaactcaagtt

SEQ ID NO: 8212 - DNA, 21 bp, Homo sapiens
ctaaattgctrtctcaacttg

SEQ ID NO: 8213 - DNA, 21 bp, Homo sapiens
agtgacttgcyaactttattg

SEQ ID NO: 8214 - DNA, 21 bp, Homo sapiens
gtttgtatttygattgtggat

SEQ ID NO: 8215 - DNA, 21 bp, Homo sapiens
tgaaataaatsttgccacgtt

SEQ ID NO: 8216 - DNA, 21 bp, Homo sapiens
cttctccaccytatcattttt

SEQ ID NO: 8217 - DNA, 21 bp, Homo sapiens
aattttgtctsttcaacctta

SEQ ID NO: 8218 - DNA, 21 bp, Homo sapiens
tcacatggtaratttccgtta

SEQ ID NO: 8219 - DNA, 21 bp, Homo sapiens
tagatgcaaawagttcattag

SEQ ID NO: 8220 - DNA, 21 bp, Homo sapiens
taaaggacatrtatggattgc

SEQ ID NO: 8221 - DNA, 21 bp, Homo sapiens
ttctcagaaayagtatctttt

SEQ ID NO: 8222 - DNA, 21 bp, Homo sapiens
catgattatcmatttactaac

SEQ ID NO: 8223 - DNA, 21 bp, Homo sapiens
tcatgtttgawtgcagagaaa

SEQ ID NO: 8224 - DNA, 21 bp, Homo sapiens
tattcatgtckattaaggagt

SEQ ID NO: 8225 - DNA, 21 bp, Homo sapiens
ttgtaagaggmcactgaccta

SEQ ID NO: 8226 - DNA, 21 bp, Homo sapiens
ggagtgtctgsttgcctctcc

SEQ ID NO: 8227 - DNA, 21 bp, Homo sapiens
aagcccttaargaaatataga

SEQ ID NO: 8228 - DNA, 21 bp, Homo sapiens
ctttgttgtaytcccacatgt

SEQ ID NO: 8229 - DNA, 21 bp, Homo sapiens
gtatttttacrcttcactctg

SEQ ID NO: 8230 - DNA, 21 bp, Homo sapiens
tttgtcttttktaagataaat

SEQ ID NO: 8231 - DNA, 21 bp, Homo sapiens
ctccaaacgcraagcaaattt

SEQ ID NO: 8232 - DNA, 21 bp, Homo sapiens
atgcacatatrcaacatagga

SEQ ID NO: 8233 - DNA, 21 bp, Homo sapiens
ctgtttaggcrtctgtaattg

SEQ ID NO: 8234 - DNA, 21 bp, Homo sapiens
ataaatgcacytgtcctgaag

SEQ ID NO: 8235 - DNA, 21 bp, Homo sapiens
tcggtgaacaygaagctctaa

SEQ ID NO: 8236 - DNA, 21 bp, Homo sapiens
ttgaagtcccrtgcatgtatt

SEQ ID NO: 8237 - DNA, 21 bp, Homo sapiens
cctatggagayaaagccatac

SEQ ID NO: 8238 - DNA, 21 bp, Homo sapiens
taagaggtatygtcataacaa

SEQ ID NO: 8239 - DNA, 21 bp, Homo sapiens
agttcaaggcyttttagcttt

SEQ ID NO: 8240 - DNA, 21 bp, Homo sapiens
attttgaatcrtatgttcgaa

SEQ ID NO: 8241 - DNA, 21 bp, Homo sapiens
ggaaacttttyttctatatta

SEQ ID NO: 8242 - DNA, 21 bp, Homo sapiens
ttatctttgasagttgctgaa

SEQ ID NO: 8243 - DNA, 21 bp, Homo sapiens
agtaaaagagscttaaaaatg

SEQ ID NO: 8244 - DNA, 21 bp, Homo sapiens
tacttcccatyactacatctc

SEQ ID NO: 8245 - DNA, 21 bp, Homo sapiens
taatggattgyaaatggaaag

SEQ ID NO: 8246 - DNA, 21 bp, Homo sapiens
aagagctacawattaatcaca

SEQ ID NO: 8247 - DNA, 21 bp, Homo sapiens
ctataaataascatgccctaa

SEQ ID NO: 8248 - DNA, 21 bp, Homo sapiens
tttctaaaacrtatttgagct

SEQ ID NO: 8249 - DNA, 21 bp, Homo sapiens
ataaagtccayggtggattct

SEQ ID NO: 8250 - DNA, 21 bp, Homo sapiens
tggcccctttygccaacgcca

SEQ ID NO: 8251 - DNA, 21 bp, Homo sapiens
ataaaatcgtrggattagaga

SEQ ID NO: 8252 - DNA, 21 bp, Homo sapiens
atgtgccagtwtgcttttatt

SEQ ID NO: 8253 - DNA, 21 bp, Homo sapiens
tcctgactacsagggcaagga

SEQ ID NO: 8254 - DNA, 21 bp, Homo sapiens
aaaggtcaccrtcatctagca

SEQ ID NO: 8255 - DNA, 21 bp, Homo sapiens
aactatgctaygacaccatta

SEQ ID NO: 8256 - DNA, 21 bp, Homo sapiens
ataattgttaygcatttttga

SEQ ID NO: 8257 - DNA, 21 bp, Homo sapiens
tatataggtcratgaaacaga

SEQ ID NO: 8258 - DNA, 21 bp, Homo sapiens
gcagcaaaatrccttggtcac

SEQ ID NO: 8259 - DNA, 21 bp, Homo sapiens
actgcaaaccycaatcttatg

SEQ ID NO: 8260 - DNA, 21 bp, Homo sapiens
taggcgagtcragatagaaaa

SEQ ID NO: 8261 - DNA, 21 bp, Homo sapiens
aaaaacattcwtcaaattaat

SEQ ID NO: 8262 - DNA, 21 bp, Homo sapiens
aatgagattcyttggaagatg

SEQ ID NO: 8263 - DNA, 21 bp, Homo sapiens
aaacataatamaatcattttc

SEQ ID NO: 8264 - DNA, 21 bp, Homo sapiens
tactgaaattytaaagtagaa

SEQ ID NO: 8265 - DNA, 21 bp, Homo sapiens
agtacctattragatgatgac

SEQ ID NO: 8266 - DNA, 21 bp, Homo sapiens
ccttctttcayaggcacagag

SEQ ID NO: 8267 - DNA, 21 bp, Homo sapiens
gaatggactcygcattaaccc

SEQ ID NO: 8268 - DNA, 21 bp, Homo sapiens
ggttgctttcyttactttaat

SEQ ID NO: 8269 - DNA, 21 bp, Homo sapiens
attgaaatacraaagaatact

SEQ ID NO: 8270 - DNA, 21 bp, Homo sapiens
gtaaagcaaasgactatagta

SEQ ID NO: 8271 - DNA, 21 bp, Homo sapiens
gtggtagccakaataatggtc

SEQ ID NO: 8272 - DNA, 21 bp, Homo sapiens
gcaatagactmccactagaag

SEQ ID NO: 8273 - DNA, 21 bp, Homo sapiens
tctacagttcyttcatttagg

SEQ ID NO: 8274 - DNA, 21 bp, Homo sapiens
tctggtctcaytggtccctgt

SEQ ID NO: 8275 - DNA, 21 bp, Homo sapiens
atacccactcrtcttagtgca

SEQ ID NO: 8276 - DNA, 21 bp, Homo sapiens
aaagtcaaatratttctataa

SEQ ID NO: 8277 - DNA, 21 bp, Homo sapiens
atcaggttttrtaagaaaatt

SEQ ID NO: 8278 - DNA, 21 bp, Homo sapiens
gccaacatttyattttttaag

SEQ ID NO: 8279 - DNA, 21 bp, Homo sapiens
taacattttcragtttttatg

SEQ ID NO: 8280 - DNA, 21 bp, Homo sapiens
ttcctctagtsgtgacatgaa

SEQ ID NO: 8281 - DNA, 21 bp, Homo sapiens
atagctcttartttttaaaag

SEQ ID NO: 8282 - DNA, 21 bp, Homo sapiens
caatatattaygccaaagttg

SEQ ID NO: 8283 - DNA, 21 bp, Homo sapiens
ctctttgaagrtagagattgt

SEQ ID NO: 8284 - DNA, 21 bp, Homo sapiens
agaacatcctygatgcttacc

SEQ ID NO: 8285 - DNA, 21 bp, Homo sapiens
tctagatgaaraaatgcaact

SEQ ID NO: 8286 - DNA, 21 bp, Homo sapiens
tgcaaaaacaygttctccaga

SEQ ID NO: 8287 - DNA, 21 bp, Homo sapiens
ctctgcttaartgacaagtca

SEQ ID NO: 8288 - DNA, 21 bp, Homo sapiens
gaggaaaaacygtatgcaaaa

SEQ ID NO: 8289 - DNA, 21 bp, Homo sapiens
cggagcagccrccagtgtgtc

SEQ ID NO: 8290 - DNA, 21 bp, Homo sapiens
gccctcccagrgtctggctgt

SEQ ID NO: 8291 - DNA, 21 bp, Homo sapiens
tgccacctccwgggactggtg

SEQ ID NO: 8292 - DNA, 21 bp, Homo sapiens
ctgagtttcaytctatgggaa

SEQ ID NO: 8293 - DNA, 21 bp, Homo sapiens
tcgctgagtckgctcccagtt

SEQ ID NO: 8294 - DNA, 21 bp, Homo sapiens
agtgagaggcygggggaaatc

SEQ ID NO: 8295 - DNA, 21 bp, Homo sapiens
gctggattgcmaagccgaagt

SEQ ID NO: 8296 - DNA, 21 bp, Homo sapiens
tccttcttcakggagccctgc

SEQ ID NO: 8297 - DNA, 21 bp, Homo sapiens
cgaacgctggrgtctgtgaca

SEQ ID NO: 8298 - DNA, 21 bp, Homo sapiens
aaactgtatcsgcagtgacac

SEQ ID NO: 8299 - DNA, 21 bp, Homo sapiens
acccataagcrtgaatttgtt

SEQ ID NO: 8300 - DNA, 21 bp, Homo sapiens
aagcttccatscctgctggca

SEQ ID NO: 8301 - DNA, 21 bp, Homo sapiens
ccctgctgggyacacacagat

SEQ ID NO: 8302 - DNA, 21 bp, Homo sapiens
tcgccaaaggraaaactcagg

SEQ ID NO: 8303 - DNA, 21 bp, Homo sapiens
ggccttccccraaggcagaca

SEQ ID NO: 8304 - DNA, 21 bp, Homo sapiens
agcactgcccsattttcttgg

SEQ ID NO: 8305 - DNA, 21 bp, Homo sapiens
ttggtaaagaygaatcctgtc

SEQ ID NO: 8306 - DNA, 21 bp, Homo sapiens
ttggcaatcastcttctattt

SEQ ID NO: 8307 - DNA, 21 bp, Homo sapiens
aacatgattaytgactttatg

SEQ ID NO: 8308 - DNA, 21 bp, Homo sapiens
atctcagcctyttttgcaagt

SEQ ID NO: 8309 - DNA, 21 bp, Homo sapiens
tgaccgctcgkgatgttaagc

SEQ ID NO: 8310 - DNA, 21 bp, Homo sapiens
cacatatgttkgtcttcagag

SEQ ID NO: 8311 - DNA, 21 bp, Homo sapiens
tgtgtagctaygcatgctcat

SEQ ID NO: 8312 - DNA, 21 bp, Homo sapiens
ccctccagatyggattctttc

SEQ ID NO: 8313 - DNA, 21 bp, Homo sapiens
cgaggtttccrtcacatagct

SEQ ID NO: 8314 - DNA, 21 bp, Homo sapiens
gaaaaccgatytgtatggtcc

SEQ ID NO: 8315 - DNA, 21 bp, Homo sapiens
atgggtgaatrtatgtaaggt

SEQ ID NO: 8316 - DNA, 21 bp, Homo sapiens
gctctgtggakttgataggtg

SEQ ID NO: 8317 - DNA, 21 bp, Homo sapiens
gactgggcacraagtatatgc

SEQ ID NO: 8318 - DNA, 21 bp, Homo sapiens
ctgaccttatmtccaatcctc

SEQ ID NO: 8319 - DNA, 21 bp, Homo sapiens
tttcttgtacygaatatttac

SEQ ID NO: 8320 - DNA, 21 bp, Homo sapiens
tttttctccawgtttatttaa

SEQ ID NO: 8321 - DNA, 21 bp, Homo sapiens
tcaaagcagaygtttagcatc

SEQ ID NO: 8322 - DNA, 21 bp, Homo sapiens
caaaagccttycggcgtgggc

SEQ ID NO: 8323 - DNA, 21 bp, Homo sapiens
ccaacaaccakgacaggcaaa

SEQ ID NO: 8324 - DNA, 21 bp, Homo sapiens
agacactcagrtttcaaagac

SEQ ID NO: 8325 - DNA, 21 bp, Homo sapiens
ttgcacatatytatgaggaca

SEQ ID NO: 8326 - DNA, 21 bp, Homo sapiens
accccctgacscttcctcaat

SEQ ID NO: 8327 - DNA, 21 bp, Homo sapiens
acttctgaacmggaacatgta

SEQ ID NO: 8328 - DNA, 21 bp, Homo sapiens
ggaagatttayaccaggaact

SEQ ID NO: 8329 - DNA, 21 bp, Homo sapiens
atttattgtayaggccttcaa

SEQ ID NO: 8330 - DNA, 21 bp, Homo sapiens
tcctttttatytaatttacag

SEQ ID NO: 8331 - DNA, 21 bp, Homo sapiens
gtgatgcccartgttctgctt

SEQ ID NO: 8332 - DNA, 21 bp, Homo sapiens
atttcactagrcagaagtgtg

SEQ ID NO: 8333 - DNA, 21 bp, Homo sapiens
gttgagtatcrgaaaagtgaa

SEQ ID NO: 8334 - DNA, 21 bp, Homo sapiens
atttgggactrtgttcatgca

SEQ ID NO: 8335 - DNA, 21 bp, Homo sapiens
ctgcctggagratctgtctga

SEQ ID NO: 8336 - DNA, 21 bp, Homo sapiens
ctgtgtgcatrctgcctgtgt

SEQ ID NO: 8337 - DNA, 21 bp, Homo sapiens
cgagcaacttrgaaagacaaa

SEQ ID NO: 8338 - DNA, 21 bp, Homo sapiens
ctgtttgattrgatgactcat

SEQ ID NO: 8339 - DNA, 21 bp, Homo sapiens
ttgtaatttcytatcgtaatt

SEQ ID NO: 8340 - DNA, 21 bp, Homo sapiens
ttttaatctarctctttattc

SEQ ID NO: 8341 - DNA, 21 bp, Homo sapiens
gtcttaatttwtcctacattt

SEQ ID NO: 8342 - DNA, 21 bp, Homo sapiens
aaggatggatrtaacggagag

SEQ ID NO: 8343 - DNA, 21 bp, Homo sapiens
tgtggggaatrgaaattgaga

SEQ ID NO: 8344 - DNA, 21 bp, Homo sapiens
acgagcattarctgttttata

SEQ ID NO: 8345 - DNA, 21 bp, Homo sapiens
ttgaaggacayagatggatac

SEQ ID NO: 8346 - DNA, 21 bp, Homo sapiens
ggaatatgctrttgtccctgc

SEQ ID NO: 8347 - DNA, 21 bp, Homo sapiens
attggaattgrtctttgaaga

SEQ ID NO: 8348 - DNA, 21 bp, Homo sapiens
gctgttatttwtttccctagc

SEQ ID NO: 8349 - DNA, 21 bp, Homo sapiens
tatttgcagayattttttttt

SEQ ID NO: 8350 - DNA, 21 bp, Homo sapiens
gtagtgtgctrgataacagag

SEQ ID NO: 8351 - DNA, 21 bp, Homo sapiens
cagaaccaaarggctgactac

SEQ ID NO: 8352 - DNA, 21 bp, Homo sapiens
gatatacaaaktcatctttaa

SEQ ID NO: 8353 - DNA, 21 bp, Homo sapiens
gtacccttaayggccagctaa

SEQ ID NO: 8354 - DNA, 21 bp, Homo sapiens
agtaccaaatrtaaagacatc

SEQ ID NO: 8355 - DNA, 21 bp, Homo sapiens
atggggaagayagtctctata

SEQ ID NO: 8356 - DNA, 21 bp, Homo sapiens
gatcgttcacyttttgtgtgt

SEQ ID NO: 8357 - DNA, 21 bp, Homo sapiens
aattaagcagrttaatgcagt

SEQ ID NO: 8358 - DNA, 21 bp, Homo sapiens
agatttgaccrtaagctctgg

SEQ ID NO: 8359 - DNA, 21 bp, Homo sapiens
ctccaagtctyctcttgaatg

SEQ ID NO: 8360 - DNA, 21 bp, Homo sapiens
tgaaagccccrtccttatcag

SEQ ID NO: 8361 - DNA, 21 bp, Homo sapiens
tctattgttcyatactgtctc

SEQ ID NO: 8362 - DNA, 21 bp, Homo sapiens
gtccttgggcrtgcgttttta

SEQ ID NO: 8363 - DNA, 21 bp, Homo sapiens
tgctttaaccragtcaaactg

SEQ ID NO: 8364 - DNA, 21 bp, Homo sapiens
tttcctacctktttcctctgt

SEQ ID NO: 8365 - DNA, 21 bp, Homo sapiens
ccagacagccrtcttctttag

SEQ ID NO: 8366 - DNA, 21 bp, Homo sapiens
tctgttaaaayatttaatacc

SEQ ID NO: 8367 - DNA, 21 bp, Homo sapiens
ctaatctcaastgttaggagg

SEQ ID NO: 8368 - DNA, 21 bp, Homo sapiens
catcttcttaktacctggaag

SEQ ID NO: 8369 - DNA, 21 bp, Homo sapiens
ttgtgcagaaragaacagaag

SEQ ID NO: 8370 - DNA, 21 bp, Homo sapiens
ctctttcaggrtgcactggct

SEQ ID NO: 8371 - DNA, 21 bp, Homo sapiens
cgtttccttcycttctaggca

SEQ ID NO: 8372 - DNA, 21 bp, Homo sapiens
agccaggaatkgtcagtactg

SEQ ID NO: 8373 - DNA, 21 bp, Homo sapiens
acacatattcrtaagttaaac

SEQ ID NO: 8374 - DNA, 21 bp, Homo sapiens
ctccaagcccrgctgctaaaa

SEQ ID NO: 8375 - DNA, 21 bp, Homo sapiens
agttaacaaargggtttatgt

SEQ ID NO: 8376 - DNA, 21 bp, Homo sapiens
aataaaggctstaaaacttaa

SEQ ID NO: 8377 - DNA, 21 bp, Homo sapiens
tgacctttcayatttcccatg

SEQ ID NO: 8378 - DNA, 21 bp, Homo sapiens
ttaagcatacrtttttccacc

SEQ ID NO: 8379 - DNA, 21 bp, Homo sapiens
tatttctcccycaagttccag

SEQ ID NO: 8380 - DNA, 21 bp, Homo sapiens
acgagcaggtkgtcacccacc

SEQ ID NO: 8381 - DNA, 21 bp, Homo sapiens
ggagcactgcyggaccaaatg

SEQ ID NO: 8382 - DNA, 21 bp, Homo sapiens
aatattttatktgaaaagtca

SEQ ID NO: 8383 - DNA, 21 bp, Homo sapiens
catctaagacyatacctagaa

SEQ ID NO: 8384 - DNA, 21 bp, Homo sapiens
catgttgcttktaagaacaaa

SEQ ID NO: 8385 - DNA, 21 bp, Homo sapiens
gagcaactgcraataattccc

SEQ ID NO: 8386 - DNA, 21 bp, Homo sapiens
cacactggctktagggaaatg

SEQ ID NO: 8387 - DNA, 21 bp, Homo sapiens
gcctagaacayagaaaattac

SEQ ID NO: 8388 - DNA, 21 bp, Homo sapiens
gaaaaaataayccatggagaa

SEQ ID NO: 8389 - DNA, 21 bp, Homo sapiens
cccctgtcctrtatcagtggt

SEQ ID NO: 8390 - DNA, 21 bp, Homo sapiens
taactattttraaagcttata

SEQ ID NO: 8391 - DNA, 21 bp, Homo sapiens
tctcactgggktttgccagag

SEQ ID NO: 8392 - DNA, 21 bp, Homo sapiens
ttctctatacmctaaaaatga

SEQ ID NO: 8393 - DNA, 21 bp, Homo sapiens
ttatggaaggyagaacttgca

SEQ ID NO: 8394 - DNA, 21 bp, Homo sapiens
ctgattcaatrtgtaaagggc

SEQ ID NO: 8395 - DNA, 21 bp, Homo sapiens
tcgaatggtakgcttaacctc

SEQ ID NO: 8396 - DNA, 21 bp, Homo sapiens
aaaagatctakaacttcccca

SEQ ID NO: 8397 - DNA, 21 bp, Homo sapiens
aatctttacartgatgactgc

SEQ ID NO: 8398 - DNA, 21 bp, Homo sapiens
tatgaccttaygaggcattct

SEQ ID NO: 8399 - DNA, 21 bp, Homo sapiens
gagaggcagakagataactgt

SEQ ID NO: 8400 - DNA, 21 bp, Homo sapiens
tcaagaagtargcaggtaaag

SEQ ID NO: 8401 - DNA, 21 bp, Homo sapiens
gctaagaagaytaaacaggga

SEQ ID NO: 8402 - DNA, 21 bp, Homo sapiens
gttcccacacmaaaactagga

SEQ ID NO: 8403 - DNA, 21 bp, Homo sapiens
tattttcatgrgtctgaattg

SEQ ID NO: 8404 - DNA, 21 bp, Homo sapiens
tggccaaagtyactttttaga

SEQ ID NO: 8405 - DNA, 21 bp, Homo sapiens
tttctagtgcrtgttaaagat

SEQ ID NO: 8406 - DNA, 21 bp, Homo sapiens
tgaaagtgtaygaaaggttaa

SEQ ID NO: 8407 - DNA, 21 bp, Homo sapiens
ttttccattamtacctaacac

SEQ ID NO: 8408 - DNA, 21 bp, Homo sapiens
tcatacaacargtgtgtgttt

SEQ ID NO: 8409 - DNA, 21 bp, Homo sapiens
gaggtcccackacccttgttg

SEQ ID NO: 8410 - DNA, 21 bp, Homo sapiens
atttaaactaycttaaaacac

SEQ ID NO: 8411 - DNA, 21 bp, Homo sapiens
tctagcacagycccagaggca

SEQ ID NO: 8412 - DNA, 21 bp, Homo sapiens
gagctagaaasatggggagat

SEQ ID NO: 8413 - DNA, 21 bp, Homo sapiens
gcagataagayaattcaggta

SEQ ID NO: 8414 - DNA, 21 bp, Homo sapiens
ggagtaaaatwactttcctaa

SEQ ID NO: 8415 - DNA, 21 bp, Homo sapiens
ctttatatctrtgcaagaaca

SEQ ID NO: 8416 - DNA, 21 bp, Homo sapiens
aatccttctaytttctagtcc

SEQ ID NO: 8417 - DNA, 21 bp, Homo sapiens
gtataaagaawgccttgagaa

SEQ ID NO: 8418 - DNA, 21 bp, Homo sapiens
ctaagtcatgyccagactcct

SEQ ID NO: 8419 - DNA, 21 bp, Homo sapiens
ccatgattaaygtacaacata

SEQ ID NO: 8420 - DNA, 21 bp, Homo sapiens
tttgaaatatytaattgatga

SEQ ID NO: 8421 - DNA, 21 bp, Homo sapiens
tttttcttcgyaagttcttaa

SEQ ID NO: 8422 - DNA, 21 bp, Homo sapiens
tctgacagaaraatgtggggt

SEQ ID NO: 8423 - DNA, 21 bp, Homo sapiens
ctagtgcaatytcattttgac

SEQ ID NO: 8424 - DNA, 21 bp, Homo sapiens
ctgcaaagctrggaaccaggg

SEQ ID NO: 8425 - DNA, 21 bp, Homo sapiens
gttgctgaggsactttactcc

SEQ ID NO: 8426 - DNA, 21 bp, Homo sapiens
gccattgctaygatttctccc

SEQ ID NO: 8427 - DNA, 21 bp, Homo sapiens
gaagttgccarccccacatca

SEQ ID NO: 8428 - DNA, 21 bp, Homo sapiens
gtggtatcctkacatgctgta

SEQ ID NO: 8429 - DNA, 21 bp, Homo sapiens
gggcagctgtrgccacagaat

SEQ ID NO: 8430 - DNA, 21 bp, Homo sapiens
atgccaactcrggccacatgc

SEQ ID NO: 8431 - DNA, 21 bp, Homo sapiens
cccaggggctkgcattctcgg

SEQ ID NO: 8432 - DNA, 21 bp, Homo sapiens
aatgagagggrctgtgtaagg

SEQ ID NO: 8433 - DNA, 21 bp, Homo sapiens
gagatcagatytttctgatga

SEQ ID NO: 8434 - DNA, 21 bp, Homo sapiens
tcacctgggtrcaggatacaa

SEQ ID NO: 8435 - DNA, 21 bp, Homo sapiens
gacaggagggmaagggccatg

SEQ ID NO: 8436 - DNA, 21 bp, Homo sapiens
agaaatcacamtttttgcaaa

SEQ ID NO: 8437 - DNA, 21 bp, Homo sapiens
agggttgaaartgcttctagg

SEQ ID NO: 8438 - DNA, 21 bp, Homo sapiens
aagaatgaacrggaatcacat

SEQ ID NO: 8439 - DNA, 21 bp, Homo sapiens
aatctacataragcaactggg

SEQ ID NO: 8440 - DNA, 21 bp, Homo sapiens
ctgtaattaartacttttccc

SEQ ID NO: 8441 - DNA, 21 bp, Homo sapiens
cgtattttgtkcatgattcta

SEQ ID NO: 8442 - DNA, 21 bp, Homo sapiens
cagattacacraaggagtgaa

SEQ ID NO: 8443 - DNA, 21 bp, Homo sapiens
agattcactgyagtcagaaga

SEQ ID NO: 8444 - DNA, 21 bp, Homo sapiens
aaacagtctaygctttggcaa

SEQ ID NO: 8445 - DNA, 21 bp, Homo sapiens
ggctattaccycaatctgaaa

SEQ ID NO: 8446 - DNA, 21 bp, Homo sapiens
aaaagaagaartctcctttga

SEQ ID NO: 8447 - DNA, 21 bp, Homo sapiens
tggcagcgtgrtgtgtggaca

SEQ ID NO: 8448 - DNA, 21 bp, Homo sapiens
ggatcccactygttcttcccc

SEQ ID NO: 8449 - DNA, 21 bp, Homo sapiens
gtgagcttgaratcctgcagc

SEQ ID NO: 8450 - DNA, 21 bp, Homo sapiens
atgactttggwctgttccaaa

SEQ ID NO: 8451 - DNA, 21 bp, Homo sapiens
cagagtttttygttttctgta

SEQ ID NO: 8452 - DNA, 21 bp, Homo sapiens
gtttggaagascaatattttg

SEQ ID NO: 8453 - DNA, 21 bp, Homo sapiens
agtctgggtgrcaagtggtac

SEQ ID NO: 8454 - DNA, 21 bp, Homo sapiens
gttttagctaktttgataggt

SEQ ID NO: 8455 - DNA, 21 bp, Homo sapiens
gaaaagtggcrtgtgatttac

SEQ ID NO: 8456 - DNA, 21 bp, Homo sapiens
tcagcagtaayctctcttatg

SEQ ID NO: 8457 - DNA, 21 bp, Homo sapiens
aaattccttawgttcaaatgt

SEQ ID NO: 8458 - DNA, 21 bp, Homo sapiens
agcacatttartctctgagga

SEQ ID NO: 8459 - DNA, 21 bp, Homo sapiens
gaggcccaatraatgctggct

SEQ ID NO: 8460 - DNA, 21 bp, Homo sapiens
ctgagtgcatmgtgaattcca

SEQ ID NO: 8461 - DNA, 21 bp, Homo sapiens
tacttggagtwaatttattag

SEQ ID NO: 8462 - DNA, 21 bp, Homo sapiens
attcctctctmtgtttcacta

SEQ ID NO: 8463 - DNA, 21 bp, Homo sapiens
aatgttaaacrtgctaaatat

SEQ ID NO: 8464 - DNA, 21 bp, Homo sapiens
gtaacagttgycctgcctacc

SEQ ID NO: 8465 - DNA, 21 bp, Homo sapiens
ctaaacactawctctgttata

SEQ ID NO: 8466 - DNA, 21 bp, Homo sapiens
ccaacttagcrtcatttgatg

SEQ ID NO: 8467 - DNA, 21 bp, Homo sapiens
tgtggtggtgktttctgactc

SEQ ID NO: 8468 - DNA, 21 bp, Homo sapiens
tgtcatctgtrttctatgatc

SEQ ID NO: 8469 - DNA, 21 bp, Homo sapiens
aaacacatatyccccaacttt

SEQ ID NO: 8470 - DNA, 21 bp, Homo sapiens
ctagtaactayttcagagaaa

SEQ ID NO: 8471 - DNA, 21 bp, Homo sapiens
tcaatgaaatstggtgctgga

SEQ ID NO: 8472 - DNA, 21 bp, Homo sapiens
tccccaaaacmcaggcaaaaa

SEQ ID NO: 8473 - DNA, 21 bp, Homo sapiens
catgaggttgrgtaagacacc

SEQ ID NO: 8474 - DNA, 21 bp, Homo sapiens
tataatttctyaagcagatac

SEQ ID NO: 8475 - DNA, 21 bp, Homo sapiens
cctcctctcasagaaaaagag

SEQ ID NO: 8476 - DNA, 21 bp, Homo sapiens
aagaggatggrgtgtcttata

SEQ ID NO: 8477 - DNA, 21 bp, Homo sapiens
cactagttgcrgaaacaaaaa

SEQ ID NO: 8478 - DNA, 21 bp, Homo sapiens
tacctgttttscccatactat

SEQ ID NO: 8479 - DNA, 21 bp, Homo sapiens
tatacaaatgrccatgaattc

SEQ ID NO: 8480 - DNA, 21 bp, Homo sapiens
aacagaaataytttttctccc

SEQ ID NO: 8481 - DNA, 21 bp, Homo sapiens
aattggtatgrgttcctacca

SEQ ID NO: 8482 - DNA, 21 bp, Homo sapiens
ccctttgaagwtctatttgtc

SEQ ID NO: 8483 - DNA, 21 bp, Homo sapiens
gtatgagtcaygaatgtattt

SEQ ID NO: 8484 - DNA, 21 bp, Homo sapiens
agctcagccaktatcagaaag

SEQ ID NO: 8485 - DNA, 21 bp, Homo sapiens
actgttttgcrctcccatgac

SEQ ID NO: 8486 - DNA, 21 bp, Homo sapiens
ttatagctaakaaagttgggg

SEQ ID NO: 8487 - DNA, 21 bp, Homo sapiens
agcagtcctartcacaggcaa

SEQ ID NO: 8488 - DNA, 21 bp, Homo sapiens
aattacactayaaatcccatc

SEQ ID NO: 8489 - DNA, 21 bp, Homo sapiens
acttttttaasaacagaagct

SEQ ID NO: 8490 - DNA, 21 bp, Homo sapiens
tccactttggyttcaaaatgt

SEQ ID NO: 8491 - DNA, 21 bp, Homo sapiens
gattaaccatyctatcttgga

SEQ ID NO: 8492 - DNA, 21 bp, Homo sapiens
gcaaaggcccrgtttcaaatc

SEQ ID NO: 8493 - DNA, 21 bp, Homo sapiens
tctgataatgytgctgatatt

SEQ ID NO: 8494 - DNA, 21 bp, Homo sapiens
aaaaacatgcwtacaaataaa

SEQ ID NO: 8495 - DNA, 21 bp, Homo sapiens
tcatccaccarctagagtata

SEQ ID NO: 8496 - DNA, 21 bp, Homo sapiens
ggtaactggtyctgtatagtc

SEQ ID NO: 8497 - DNA, 21 bp, Homo sapiens
aagtggcctcygttcttcaaa

SEQ ID NO: 8498 - DNA, 21 bp, Homo sapiens
aaaggcctgtytcatatccct

SEQ ID NO: 8499 - DNA, 21 bp, Homo sapiens
catcagccgaygtgctcaggt

SEQ ID NO: 8500 - DNA, 21 bp, Homo sapiens
cttttttcttrtatctgttct

SEQ ID NO: 8501 - DNA, 21 bp, Homo sapiens
gcaaggaaagygctcaaatgg

SEQ ID NO: 8502 - DNA, 21 bp, Homo sapiens
tcctggtgctytctccctcct

SEQ ID NO: 8503 - DNA, 21 bp, Homo sapiens
catacattttyttatattttg

SEQ ID NO: 8504 - DNA, 21 bp, Homo sapiens
atatttgaagscagtcaaact

SEQ ID NO: 8505 - DNA, 21 bp, Homo sapiens
agggatttccratttccataa

SEQ ID NO: 8506 - DNA, 21 bp, Homo sapiens
tcttgacagcwagtaatccga

SEQ ID NO: 8507 - DNA, 21 bp, Homo sapiens
tttccaggcgratttgttgtc

SEQ ID NO: 8508 - DNA, 21 bp, Homo sapiens
ggcatgtcacmgggaaagaag

SEQ ID NO: 8509 - DNA, 21 bp, Homo sapiens
cctcttttggkccctccagtc

SEQ ID NO: 8510 - DNA, 21 bp, Homo sapiens
ggaagaaaagrcaccaccgaa

SEQ ID NO: 8511 - DNA, 21 bp, Homo sapiens
ggagcaagccwttacaaaaaa

SEQ ID NO: 8512 - DNA, 21 bp, Homo sapiens
ggatccagcaragaaggagca

SEQ ID NO: 8513 - DNA, 21 bp, Homo sapiens
agatggtctcycctggcctaa

SEQ ID NO: 8514 - DNA, 21 bp, Homo sapiens
tgacagcggaracaattggga

SEQ ID NO: 8515 - DNA, 21 bp, Homo sapiens
tccgggcggcygacccgctgg

SEQ ID NO: 8516 - DNA, 21 bp, Homo sapiens
ccttcctcccsctatttttaa

SEQ ID NO: 8517 - DNA, 21 bp, Homo sapiens
cactctcctaytcccaaccag

SEQ ID NO: 8518 - DNA, 21 bp, Homo sapiens
ggaaaaaaaasaagtgacccc

SEQ ID NO: 8519 - DNA, 21 bp, Homo sapiens
ccggattgctyccagtgaaat

SEQ ID NO: 8520 - DNA, 21 bp, Homo sapiens
gacccaggacragagggaact

SEQ ID NO: 8521 - DNA, 21 bp, Homo sapiens
acctgagttayggaaaggagt

SEQ ID NO: 8522 - DNA, 21 bp, Homo sapiens
tgtgtaggacrttgagagctg

SEQ ID NO: 8523 - DNA, 21 bp, Homo sapiens
ggaatatcaawcaatcaaatt

SEQ ID NO: 8524 - DNA, 21 bp, Homo sapiens
aaacttcaaargatttaaatt

SEQ ID NO: 8525 - DNA, 21 bp, Homo sapiens
gcttcagtcayggtgtggggc

SEQ ID NO: 8526 - DNA, 21 bp, Homo sapiens
aagtctgtcarcaccatcttt

SEQ ID NO: 8527 - DNA, 21 bp, Homo sapiens
catatcaccasaatttatttt

SEQ ID NO: 8528 - DNA, 21 bp, Homo sapiens
catgtgctatmatttaatttt

SEQ ID NO: 8529 - DNA, 21 bp, Homo sapiens
aacccgaagakcctggagaga

SEQ ID NO: 8530 - DNA, 21 bp, Homo sapiens
aaatggttgcrctgaacttaa

SEQ ID NO: 8531 - DNA, 21 bp, Homo sapiens
ctctttgcacrtgtctgcttc

SEQ ID NO: 8532 - DNA, 21 bp, Homo sapiens
tcttggtgaakgcaggaatta

SEQ ID NO: 8533 - DNA, 21 bp, Homo sapiens
tctctgttttygtatccttcc

SEQ ID NO: 8534 - DNA, 21 bp, Homo sapiens
tgtgaagagayagccgtaagg

SEQ ID NO: 8535 - DNA, 21 bp, Homo sapiens
taatctacctrcttactaccc

SEQ ID NO: 8536 - DNA, 21 bp, Homo sapiens
tgacctagtarttattttaat

SEQ ID NO: 8537 - DNA, 21 bp, Homo sapiens
tcctctgtaarcccctacagt

SEQ ID NO: 8538 - DNA, 21 bp, Homo sapiens
aatgagttgcwcaattatcaa

SEQ ID NO: 8539 - DNA, 21 bp, Homo sapiens
aaacataaggycttcttggtc

SEQ ID NO: 8540 - DNA, 21 bp, Homo sapiens
ttatagcttcrtgattaaaat

SEQ ID NO: 8541 - DNA, 21 bp, Homo sapiens
acaaggaaaakatctttaaac

SEQ ID NO: 8542 - DNA, 21 bp, Homo sapiens
gtgacagagasagaacatgaa

SEQ ID NO: 8543 - DNA, 21 bp, Homo sapiens
ctgtcactcartgaagctcat

SEQ ID NO: 8544 - DNA, 21 bp, Homo sapiens
caagagtgatrttagctatgt

SEQ ID NO: 8545 - DNA, 21 bp, Homo sapiens
cacacttattrtcagtctcac
